United States Patent Application Publication US 2012/0277999 A1 - sequence listing, part 3

SEQ ID NO: 1582 - DNA, 2293 bp, Homo sapiens
agaggaggctagcgttccttgctgcctcgccccgcggcctctaggagacaggggccacggggagagcacagccacccggcgcgaagagccctctgtaccccgcttcctcttgaggccctcggaccgtccaggaaatgtctgggagcccgcctgcggagggcatagcgccgaccctcgctccccgcccaggacccgaatgaacctggagagcggatgccagcagtggccgaggcgctaggacaggaaggaccgccagacctctcaagatcagccttcctcgccaccgttctcacctctttgtccgctgccttctcctcaatgcctagcagcgcgtacaggtccatctgtaagagctccttggtcactgccatggttccggcctgacggattcgtactacaactcccaagagtctaagcgcgcgtgaggactgcaggctccgagcggcgcctagccctctgggaattgtgttctgggtcaggcttgactgactctgagggaggccggcagtcgtgaatgaactacgactcccagcagcccccgttgccgccgctgccgtacgctggctgcaggagagcgtccggattccctgctctaggtcgcggcgggacagtgccagtgggcgtgtggggcggggcagggcagggaagggaagggcggagctggggtgagggtccaaggggcccaggacttggccggcgtgatctcagctctgcagaccctgcggtgctgggagccaccatggagagtaggtgctacggctgcgctgtcaagttcaccctcttcaagaaggagtacggctgtaagaattgtggcagggccttctgttcaggctgcctaagcttcagtgcagcagtgcctcggactgggaacacccaacagaaagtctgcaagcaatgccatgaggtcctgaccagagggtcttctgccaatgcctccaagtggtcaccacctcagaactataagaagcgtgtggcagccttggaagccaagcaaaagcccagcacttcccagagccagggactgacacgacaagaccagatgattgctgagcgcctagcacgactccgccaggagaacaagcccaagttagtcccctcacaggcagagatagaggcacggctggctgccctaaaggatgaacgtcagggttccatcccttccacccaggaaatggaggcacgacttgcagcgttgcagggcagagttctaccttctcaaaccccccagccggcacatcacacaccggacaccaggacccaagcccagcagacacaggatctgctaacgcagctggcagctgaggtggctatcgatgaaagctggaaaggaggaggcccagctgcctctctccagaatgatctcaaccagggtggcccagggagcactaattccaagaggcaggccaactggtccttggaggaggagaagagcagactgctggctgaggcagcacttgagttgcgggaggagaacacgaggcaggaacggattctggccctggccaagcgactagccatgctgcggggacaggaccccgagagagtgaccctccaggactatcgcctcccagacagtgatgacgacgaggatgaggagacagccatccaaagagtcctgcagcagctcactgaagaagcttccctggatgaggcaagtggctttaacatccctgcagagcaggcttctcgaccctggacgcaaccccgcggggcagagcctgaggcccaggatgtggaccccaggcctgaggctgaggaagaggagctcccctggtgctgcatctgcaatgaggatgccaccctacgctgcgctggctgcgatggggacctcttctgtgcccgctgcttccgagagggccatgatgcctttgagcttaaagagcaccagacatctgcctactctcctccacgtgcaggccaagagcactgaagacaccctggtcctcccggaagggcagtcccacaggcagcggcacccatttctgggcccagccacaggacgtccgatgggagagcttgtctggctctactgatgatggataggccccttcctgagccttggtgtccctggaatgaggaaagattctccattcgagagaatgactgggagggaagaagtcggggccctcctattagaagcccagactggaagtgagaggcatgatggggagagaccagactgaatctacgggtgagccctgtaacctggctctagggcacaggcccctcccctggcacttagtgggtctaataaagtatgttgattcattgggaaaaaaaaaaaaaaaaaaaa

SEQ ID NO: 1583 - DNA, 6622 bp, Homo sapiens
ggcccgccgcgtcgcaccgtcctctttcctttccttctccctccccttttcccttccttcgtcccttccttccttcctttcgccgggcgcgatggagccggggcgccggggggccgcggcgctgctagcgctgctgtgcgtggcctgcgcgctgcgcgccgggcgcgcccaatacgaacgctacagcttccgcagcttcccacgggacgagctgatgccgctcgagtcggcctaccggcacgcgctggacaagtacagcggcgagcactgggccgagagcgtgggctacctggagatcagcctgcggctgcaccgcttgctgcgcgacagcgaggccttctgccaccgcaactgcagcgccgcgccgcagcccgagcccgccgccggcctcgccagctatcccgagctgcgcctcttcgggggcctgctgcgccgcgcgcactgcctcaagcgctgcaagcagggcctgccagccttccgccagtcccagcccagccgcgaggtgctggcggacttccagcgccgcgagccctacaagttcctgcagttcgcttacttcaaggcaaataatctccccaaagccatcgccgctgctcacacctttctactgaagcatcctgatgacgaaatgatgaagaggaacatggcatattataagagcctgcctggtgccgaggactacattaaagacctggaaaccaagtcatatgaaagcctgttcatccgagcagtgcgggcatacaacggtgagaactggagaacatccatcacagacatggagctggcccttcccgacttcttcaaagccttttacgagtgtctcgcagcctgcgagggttccagggagatcaaggacttcaaggatttctacctttccatagcagatcattatgtagaagttctggaatgcaaaatacagtgtgaagagaacctcaccccagttataggaggctatccggttgagaaatttgtggctaccatgtatcattacttgcagtttgcctattataagttgaacgacctgaagaatgcagccccctgtgcagtcagctatctgctctttgatcagaatgacaaggtcatgcagcagaacctggtgtattaccagtaccacagggacacttggggcctctcggatgagcacttccagcccagacctgaagcagttcagttctttaatgtgaccacactccagaaggagctgtatgactttgctaaggaaaatataatggatgatgatgagggagaagttgtggaatatgtggatgacctcttggaactggaggagaccagctagcccacagcaaccaaagagacttcctcttggcgttcaggaaacacagattctttgtccttttcccaacagcccaggctgttgatacctcagagccttctctttactctccaaagtgaaagggaagcccccgtctctctaactgcatgtcatcaggggtgagcctgcctttcctatcttcacacctgccacctcatgttcacacctatctttctcaccttttttttgagatggagtctcgctctcttgcccaggctggagtgcaatggcacgttctcagctcactgcaacctccgcctcttgggttcaagcaattctgctgcatcagcctcccgagtacctgggattacaggcatgtgccaccacgcccggctaattttgtatttttagtagagacggggttttgccatgttggccaggctggtctcgaactcttgacttcagatgatccatctgccttggcctcccacagtgctgggattacaggcgtgagccaccatgcccggcctctttctcacctttacacctgtcttcttatcctcacatctgttttcacaccttcatccctgtcttcctcatgttcacacttgtcttccccatgttcatagctgcctttcttaccattttggtttgaagggcagtcttctctggcttgtttttttgtttttcccagaaaatcagtattattttttaaataagaaaaacattcctagaagatgataattgtgaaaacctcctttggcttatttgcttttccagattttagtctcctttctccccatccgggaaagatggtggaagacataggctaaatttctccagcctcacaatggtcttcacttggtctgacttgtaccaattctagcacccactgaaaaacaagttgagtagagagtgtagagtgcagaaatgtggcttttgccccactttgcatctccaaaattacaacggttggccgatcccatttgaggacaatgcttagttataagtctccgagttggaaaaggaagaaagccagagctgtctagtttcattcattctttcagtaaatatttattgagtacctactgtgtgctaggcattgacctgggaactagagatacttcacagaataacagggaaagttccctgtgctcatggagcttacattctacagggagaaagagatagccaatacataggaataaatatatacaaggtatcatgtagtgataattgctgtggagaaaaataaagcaggggagggagtaagaaatcctggagatgaggctgcagttttaaatggggcctcactgggaatgtgacgttgagcagagacgttagggaagtggatcctggacaaggcattccaggcagaggaacaggatgtgcactgccccaaagtgagaacttgctctacgtggtcaggaaagagcagggagaccaagcagagtcgtgggcaggggtagaatggaaggagaggcggctggggaggacaggtggtggagggccttggcttctgctaagtgagatgggaaccactggagggtttgaacagaggagtgccttgattgatttatattttgcaagggtcattctagctgccatattgtgaaaaactttagtggacaagggcagaaggaagagggaagacctgttaggaagctactgcaaggttccaggcttgggcctgggccacagcaacagcagtggtcaaatatctagatttattttgaaaagagccaataggatttgctgagagtttgaatgtggagtgtaagagaaggaagagttaatgatgacattaaggtttttggcctgaatagcaggaaagatggagttaccagttactgaaatagggaaggatgggctgggtaagtaaggaatttggtgcaaagcaggctgtctgtggttggaatgggaggttctggctgcaaatcaaagtggagagttctctcaggtcaggtctgcagcagagctcgagacagggatctgaatgcacttggtttattgttgggggtgctctcagaaggaacctgtgaaagcctttatcagtcatttattggctgtgagaagttctctgggagtgtgggtacatttgaaggcaagtgacttcagttgagggcaagtctctggaaaagaggctgtaggcatctggcagctaccatgcatggtagtgtgttgggggtgggggtcctgggcactggctgtgtgaagggatctggcagggcaccacagcgccccctactgaaccatcagcatgtcagtggcatttaaagccatgcagctggaggggccactgagattgtctctgagtattactgagaagcaacagaaaagagccatggatggagcccttgggctctctgggaaatgggaaatcagccaaaggactgagaaggagttaccttaaggtcagagaaaaccaagagagtgtggtgttctggaagctgagctttctttattcaacctcattcccttctccaaataagccacttgtgtagttgggcccctccagggttgaaggcaagaggagaaaggcacagcgtttgggaaacaagacttttcctgcaatagcctgggaaggaataaaaggatagagtgtttgggtttttgtgtaatggtggttaattggggtggaacactcacacgttgtgctttttctgggcttcccttatcccccagaacactctaccaacctcggggaactcgggcacatccttctgtttctccttcagctctatcctgctttcctcatcccttctgacaccacgtcctcactcacctgcacaagaatccctgcatcaggttctcctttgagggtacccacccaggacagtcccctaccacttctgtcttgggctgaagttgcccacgtccacaaaatctgtactcccagcgggggtgtttggcccgaggagtcagtgttattactggtggatgcaccgtgtccacagcagcccccaatcccagcgatgcgtcagatcttacgtggcttcctgctgggggagatggccttcacccacgggatgccgggttctcctttctttcctcaccccaacctttactccaccagagaaacttccttttgaactcagtggggaagagggtgatgagacaggactagaaagtagtgggggacccagcgagtggacgccctgctccgggattcctgagtctgtaaatagtgtgcccagcagctgtgaactccccttatagcctcaggctgcagtgtccttcccagctgtgtgagaaaatgaaagccgacgtccacagggacccaggcagggttgggtgttgtgactcactccacctctgtgccctgcagaggtactgttgggtccttgtcttgtgagcctggggtgagctctctgtacatgttgttgttccacgtatgggttgacttggcatgctggggggtcctcgttcactctctgaagttggcctcctttcactggggattgaaaagcacctccacccctaccctagtgatgtcccctgaggacccaggtgatagtacagtcaatattgtcagtactttgctttgattgaaggctgtagagctgagttaccaaaatttctatttcaaaggaaaccaaaccttaaaaaaaaaaaacaaaaactgggctgggtcttccaaacctaccatgaaaccctggtgtgcaggctgcactcaatgacctcaacccaacacctccctgagtgtgcttcttggaagagcctagaagattcctggatggagaccccattggttcagcctcaagtctggcccgtcttcgaaaaaacaaacacatttgtaagctttgtgggagcttccaggcctgctctaagatgccttgcttgtcctttgacccatcagcatggagctcagtggttgctgtttggttctgcaggctggtggggaggccgcccatcgtggtggggcatctgtccagccccattgccactcagggcatccaaacaggaggcacccgctgggaagggtctaaagatactccttgtggccactgctactgttcacacttgacttgtggagaagcgaagggctgaggggaggtttgtgtacacccatgtatttaaaagtgactgactgactgaaatgagcacataccgacatatgcaacatactaataccttcctgattttcgagactttctaattactacaactaacctgttgtgctcacctctggaattcagaaagagagccactgcgagcactgaccacaagggctgccttaggaaggaaatgtgtgctttcaggagttcttattaggggaattttaagagcacaaaaattttattgaacccaccttagtgacaaacagaaaatgatttgttagattgtcagttggaaggggtttattatgactgctggtgaaataaacagtgaccagtttctgccaacatttatggaaataacgtttctaggttttaaatgtgagccgtaaactgaagctacttcagttaaaaaaaaaaaaatcaatacttaaactgtagggaaaaggtggattggtgccagagaaaacattatttaatagtgtcagaacatggaactgcaacacagtttgtagcaaggcactgagaaaaacccacaactaatccttcatcgcagctgtctgaactcttgatcatctgccatcccccaaacagtgacttctttttttctggtgactccaggcctgaatgacctagtgtggagagtttaaactatgtacaagggaggaaagaaaaaaaggaaaggaaccttaagtaagcctcagccaaaggttttatgcattggacttcctgtgcctgcccccaggggcaagactgatccccatgcctgtgcccatgacatctccctgaaagaggacaccatgacagcccggctttgccttgactgacccactgctaccccagaaataagaatcaagagcagctattgttatccttagagtgttttccgtctagggccggctcgtgaacagccacatatccttgcacctgacactgtccccacacaaatagctggctttcgttgcttgttgaatgaatgagtgagttggctctatatccccttggagctggccggtaagatattagtgcctcattttacaagaagagaataggaaggaattaagcaatttggccaacagatacaagatagattccagagttttatctcccactttagggtggcagccagtaggccaaactccaaagaccgttgctgatgtctttttctgcctcccctctttgggttagtgtggtatgtacaagctcactcttgttgaaaattagaaaatagttgaaaacaaaaggtttttgtttttctttttaaatcacattaaatgttttacattgctta

SEQ ID NO: 1584 - DNA, 10961 bp, Homo sapiens
gctcgggcttcttgcgtccccgctaagaacatgtcacggggccgaatcgtccgtattctctcagcttcaagctcctctacttttcaaccaggtcactagcccttgactcctcttatcaaacttccggaactgccaccccaccagtgactccacaggcaccagggcatgcaacagggctgggacaggaaggctctcttcttcacctcaagcctgctgggctaacacttgcgatttttactagagttaactttgtaatgtatgtctctgactctagaatttcaagagaagttccacttagtgactcctaagtggaagttctaagatggcttcccagtgaggtgatgaagaggtttgagctttagagtgcggttgcaaagctcttctctgacctgaacaatggctgtagctgtggaccaacaaatccagactccttcagtacaagatctccaaatagttaaactggaagaagattcccactgggagcaggaaatttcccttcaagggaattaccctggaccagagacatcctgccagagcttttggcatttccgttaccaagaagcatcacgaccccgagaggccctcctccagctccagaagctctgttgtcagtggctaaggccagagaagtgtacaaaagagcagatcctggagttgctggtcctagaacagttcccgactgtccttctccaggagatccagatctgggtcagacagcagcatccggagagtggagaggaggcagtggccctggtggaagacttgcagaaagaacctggaagacagaggctggaggtgagctataaaaacatagttccgaacagttaaaatagaggtatgtgagagacagagctgccttgggttactagcagtgtgggcatacttcactattgatgttaaactggaatttgcttatttcgtggtcatggtatctgcaactttccttccaagttcaggctgactcttcagagaatgcacaacattggctgctctgagtgtccgtccctgccattaaataagaaaattgcttaaaatggtatgagcctcactgtgatcagggaggagcacatgtgacagggatgtctttttggagaacagctctcactctgtagcagccagccagaggcaagcggcttcggtggtctttgtcgacattattgagcctattgcaaaacacctgaattatcctatgtctttttgcctagggtttggcaaggcaggtaggagcagtccccagagagctgggtggccaggatgcagtggtccatggccttatctccataaagccttccacatgtctgccgtctttactgctgttgcaggcttttgcataagactggctttttcctctgcttttttttttttttttttttttttggaaagggagtctcgctctgtcacccaggctggagtgcagtggtgccatctcgggtcattgcaacctccgccaaccgggttcaagcgagtctcctgcctcagcctccctagtagctgggactacaggcgcccaccaccacgcccggctaatttttgtatttttagtagagactgggtttcaccatattggccaggctggcctcgaactcctgaccttgtgatccacccacctcggcctcccaaagtgttgggattacaggcgtgagccactgcacccaacctttcctctgcttttttatgtttgggatgtttaagttttagtccctacagaattttgaccacttccagtccttgaagagggacaggatgtgctctcaaagaaggagccctcaggatcagtactgagttctctaaacatccatccgaagcaagcacagacagaatctgtctgttccaggcaatggtgaagttcacagcagaaccagaggaacagttgaagcacagccccaaaatagaacgaactctagcccgtccgcaagagtgataagaaatcgcagtgtgggcccacgcgcgccgcacggccgggtcgccgccgtaccgtggtgtacgtgcagaatgcgcagagcgagcggcacccgcttaccctgcgctcctccgcagcctgggccgggccgcccgggacgctgaggcggtggcggcagccgagggggccggtcttgcgctccgcaggctcgcgcgcccgagcccgggttgccgttcgccgcacaggccgcgttctctcagcccacggcggcgattaggcgctgaggcggccgcctgcgctgcgccggagcctaggactcggaagcgacccggccgagggccctgggtgccagcctccttgagtcaagggtagcgggtgcatggcgcagtgacggcccctatctctctctccgctccccagcctcgggcgaggccgtccggccgcacccctcctgctcagctgcggtcgccatggccaatgacagctgcgggcccggcgagccgagctcgagcgagcgagaccggcagtactgcgagctgtgcgggaagatggagaacctgctgcgctgcagccgcagctccttctgctgcaaggagcgccagcgccaggactggaagaagcacaagctcgtgtgccagggcagcgagggcgccctcggccacggagggggccctcaccaggactccggccccgcgccgcccgctgcagcgccgccgtccagggaccgggccctggaggccaggaaggcagcgaggcgccgggacagcgcctccggggacgcagccaaggcaaaggccaagtccgcggccgaccccgcggcggccgcgtccccgcctcgcgcgtccccgggccggacaaaagccatggctgcttgttatccggtcaatggaacgggttatgtacgtcatgttgataatccaaatggagacggaagacgtgtgaaatgtattacattacgttaaagaacgggatgccaaggtaagtggaggtatacttcgaatttttctagaaggtaaagcctagtttgctgacattgaacccaaatttgatagactgctgtttttctggtctgaccatcgcaaccctcatgaagtacaaccagcatatgctacaaagtacgcaataactgtttggtatttgatgcagatgagagagcacgagctaaagtaaaatatctaacaggtgaaaaaggtgtgaggattgaactcaataaaccttcagattcagtcagtaaagacgtcttatagagcctttgatccagcaataccccacttcacctacaataattgttgacgctatttgttaatttgtgaatacgaataaatgggataaagaaaaatagacaaccagttcgcattttagtaaggaaacaaacaactttgtgtgttgcatcaaacagaagattctgactgctgtgactttgtaccgcatgatcaacttagaatctgtgattgcttacaggaagaagataagctactaatagaaaatgtttttacctctggatatgaaataagtgccctgtgtagaatttttttcattcttatattttgccagatctgttacgtagctgagttaatttcatctctacttttttaatatatgtcaagtttgaattggaataatttttctatgattaggtacaatttatcaaaactgaattgagaaaaaattacagtatttctcaaaataacgtcaatctatttttgtaaacctcttcatactattaaattttgccctaaaagacctcttaataatgattgttgccagtgactgattaattttattttacttaaaataagaaaaggagcactttaattacaactgaaaaatcagattgttttgcagtccttcctatcttacactaatttgaactcttaaagattgctgcttttttttgatattgtcaataatgaaacccaattgtaaaacagtcaccatttactaccagtaacttttagttaatgtcttacaaggaaaaagacacaataagaagagtttaattttttttttttttttgagtcttgctctgttacccaggctggagtgcagtggtgcattctcagctcactgcaaccccactgtctcccaggttcaagcaatcctcccgcctcagcctcacaactagctgggactacaggcacataccaccatgcctggctaatttttgtatttttagtagagactgggtttcaccatgttgcctaggctggggtttaagttaaatttttttaaaaactaaagtgactggcactaagtgaacttgagattatcctcagcttcaagttcctaagataagggctttcttaagctttcagatacatgtatcctctagatgtagacaataatgtcccatttctaagtcttttcctttgcttctccttaagttgattgtacttccaaatttgctgttattttttttcctaatactgtgatttatttgatctacagacaggaaccttgtctctgttgaagagcatcaagggaagattacatacgccttgaaaccgaagtgtgttgttaccgacttaatgtgcagtaactcctcagatatctgttaaggcacttcccagatgtgatgccagtcttcttacctgtactgaaagatgtttagcttagaaaaaaaaaaaagtgcaaaatcagatttaaaaaaaaaaaaagtagcagcagtgtggggaggaaggaagtacccttctgtggggagggcatagaagtactctgtgagtgcagaaagtggggtagaaggtacagctcccttctacttagaagattggtgtgttgacctcaggctgaccgcatgaatttctgggatcctaaatgggcacctccaaagtgaagaaggacctcggttggcatgttttgtaaaacaacataggggagcctgtagcacctttccttatgtgagtcagagattaccggtcccaataggttacagttggagacagattttaggtctggttggtgggaagggcaaaagggtagggttaaactaaggtgcagtaatccttaaaacagttaagtgtccccagaccaatttagatgactcaggtgtgttatcaaaactgaaaaacaaggccagttatggtggctcatgcctgtaattccagtactttggaggctgaggtgggtggattgcttgagcccaggagttcagagatgagcctgggcaatatggtgaaactccgtctcctctaaaaatacaaaaaaaaaaaaaaaaaaaattagccgggcatggtggcaggcacctgtagtcccagctactcagaaggctgaggtgggaggatcacctgagcccaggaggttaaggctgcggtaagccaaggtcacgccactgcactccagcctgggcgacagatcgaggccctgtctcaaaaaaacaaaaagcaaacaaaaaacctgaaaaacaaaatcataaaaccctgacagtcagtacctagatggatatggaggggaaaacctaaaactttcattttagaaacgtttcattttggctgggcatggtggctcacgcctgtaatcccagcactttgggaggcagaggcgggcggatcatgaggtcaggagatcgagaccatcctggctaacacagtgaaaccccgtctctactaaaaatacaaaaaattagccgggtgtggtggtgggcacctgtagtcccagctactcaggaggctgaggcaggagaatggcctgaacctgggaggcggagcttgcagtgagctgagattgtgccactgcactccagcctgggcgacagagtgagactccgtctcaaaaaaaaaaaaaaaaagaaatgtttcattttggtttttcaccaaccttcctttgataggacaaagcagatactaagagggggaggaaaggctgttctgtgtctgaacccagttgggctagtccccaagaggagctgagagccatgtactctaatgcctcccttttcttcccccagccctgcctgatgtggctctgggaattcctgcagagaagagcaggggtggccaggagatagtgagcagctcccaggtgagtcagccatttctcttatatagatcaccttttctctctctcttttttttttaatagaaatataactcttgaggcacagctcagttttctccttttgggaaaacgattaagtcatttgtctttacagattatatttctttttttttaaattttctctttttattatactttaagttctggggtacatgtgcagaacatgcaggtttgttacataggtacacacgtgccatggtggtttgctgcacccaccaacccatcgtctacattaggtatttctcctaatgctctccctcccctagcccccaatccccctcaggtcaccttttactacccaagtggggctcctgcaaccaactctcttgccgctcagaaattccaaaagaattttacccagcagggaggcccagtaactttacaatttaggctccaaaatttcatcagcctgcaaaaggttgcccaaatctccttacccatatgaggccagtgccatggctgtggtaatgagggattgcattaaaattattcttttctttgaccctgaaatcatcagattctactgatctgcttgtttgccttaaagatactggttacttcattctgtgtcgggatcttgctcacatggcatgcagtactgtgtagtggaggaaaaaaaacaaaaaccaaaagcttcagagtccaacagccttgagttgaattcccagccataccctggacttgctgtgtaactctgggcaagtctgagaagcttctggctcagtgcataatgtcagcttgtttcttttctgtctcctcctgcccgcttgattgcatttaaaagccaaaataatcactgtttcatttcttctgttgtgtcacttgccctgactcaggcattagagaggcattttgttctgaggccatgtgttttgagaaggggtgttgtttcctcaggagctagtgacacctggtgattcggctgtgtatatctcctaggaggcatggagggatccagaacctggactgaagaaccacctagaaataactcagcagaattctgaaaatgaggtcacgctgggtaagaatgcctttttttttttttcatagtcaaagttagctatggagtttctgtagtattcactactccagacctttttcaagttgaattttttttctttttccctatgtctgttcttacgtattttttttaaacttttatttcagtagtgtttggggaacaagtagtgtttggttgcatggaaaagttcttcagtggtgatttctgagattttggtgcacccatcacccaagggtagtcttttttatccatcaagtctgtacccaatgtgtagtctttgtttttttcttttttttttttttgagactgagtctcattctatcacccaggctggagtggagtggtatgatcttgactcactgcaacatctgcctcccgggttcaagtgattctcctgcctcagcctcctgagtcgctgggattacagagatgtgccaccacgcccagctaatttttgtattttttttttttttttttggcagagatggggtttcaccatgttggccaggctggtcttgaactcctgaccttaagtaatctgcctgcctcggcctcccaaagtgctgggattacaggcctgagccaccacggggccccagtgtgcagtcttttatcccctcagtctgtacccagtgtgtagtcttttatccctcacccccctgctcccaccctttccccctgggttgaatatttcaaatctatttcttccttaaatcttactcaaaggaaatccaataccatagtcagtttcaccaaggatgaatttcttgacccagaaaggaaagctcattttagggagatggtcagtttaggtatgtgtctgaattttatttaagatagatgaacgtggatatatagttatgcatttgggcctgaatttttttttctagttgttcttttcactgagctttcccaagaatccccccagaattaaaaaaaaaaaattactatctcctctccctggcatataaaatggttgggattagatttaccaaaccattacatctcccttttgtctgcctgcaaacagattttccaatccataggcccaaagtgaactcccacgtggagtaggatgaaaacccacagcatctagatcttcaaattctggagaaaaagagagtgtgaaagactgctcagtggctggggtgagagtcaagtctggccaggtgctaatctggagaaaagccaagacctggagcgagctggagtggcaggccctggaggatgagaaggtggcaggagtgcactggggatacaaagaaaccaagatttttctgggaattctcagaggcctggatccacgaaaaactccgcacctgccatcgaaaccaccaggtgtaccggattatggctgagcagctgtgagaacatggcttcctgtggaccctggagcaatgttgctatcggttcaaaaacctcctgaccgactactgcaaagccaggagcacctacacaccaggcaccagtgtcttctatgatgagatggatgccctgttgagtcttggggcactttctaacacctttgatgccttagaggtggtaggaggccttctttgggattgagaggattccaaagggaaccagggcatagcactagaagatgtggcgggatggtaatgaaatagtggaggagtctcaagaggaatcctggaggcttggtccccaggccttgaggtggaatcccagtggcaactctcccccacaatggacctcagagcagtgggagcgacgcagtcctgtgggaagcattcaggctcagaatcaggagatgtgattattgtcctggctctgttatgactaatttgggtctggaatggcctcatcgggggaaaaattggtgacaactttaagaaatactgtttatatcccgtcctcaaatattgcttgactcaaccctctactgaaccagtagtccagggtggctcacaaagaccactttgaggctcttgctctgctctttagccaaggagtctcccttcctgccttcagtaacaacattacaggaagagaggagagaaaggtaggagttaaagatccagtcatttgtttccatctaaagtgccctataagccgggcatggtggcgcaagcctgtagtcccagctactcgggaggctggggcaggagaatcacttgagcccaggagttggaggccgcagtgagctgtgatcatgccactgcattccagcctgggcgacagagtgagacccagactcagctgaaaaataataatattattaaaagaatttaaaataaagtgttccatagatgtgaaccctgcgtagattatacacaccagtctgccatttaaaaggtttgttgttcttgggcaacctctttaaatacccttagcctccattttctcatctggacagtggacattgtgatggtttctacctccctgggctgttatgaggatcctgacacagtattagcacttggcaaacgttagttttcattatcatcatcattataattattatgaaaatagataagggcattatcctgtaccctcaaaggagtaaaagggggaaaatgagtcattaaactttctcttctgggaactagaccttcttgagaggcactatcattctcatttcacctgtcacttccagacatgggagcagaaagtgaatttcagaactccatgtcccctcctgcttttctctgagcaggacttccagttccccagccagatggggtcacaatgctgcagaaaagtgaagagctttggaatgaagatctcccggacttcaaggagattcagaaaacgtccagtgcaggtgggaaatgaatgggagctagcattccaccaacaaagtcagccctgggattctaaactcggacaagccagcactggttaagggctgaggggaaccaggcactcagtgcacccagtttactattctgtggtgtggaaagcacaggacttgagaagcaggtggcacccaggaaagcctgttcccctaagtaagtttgaactttagttacttgaaaaaaggtataactgaattatgagtgtttatgattttatctttattttattttttttgagatggagtctcaccctgtcacccaggctggaatgcagtggcacaatctcggttcactgcagcctctacctctcaggttcaagcaattctcctgcctcaccctcctgagtagtggggattacaggtgtgccaccaccatgcccgtctctaatttttatatttttagtagagacggggtttcaccatgttggccaggctggtcttgaactcctgacctcaagtgatccacccaccttggccccccacaaagtgctgggattacaggcgtgagccactgtgcctggtctatctttaaattcctatctgaatttgtttaggttttttaaataaaaatctttctttttttttagagacaggggttcaccatggtgcccaggctgatctcgaactcctcctggactcaagctatcctcccacctcagcctcccaaagtactgggattacagacatgagccacatgcttgacctgaattttaactgcagttaattatcacttaaccagcgaattcacacaggagaaatcccctggccgggcgcggtggctcacacctgtaatcccagctcttcgggaggccgaggtgggtagatcacaaggtcaagagatcaagaccattctggccaacatggtgaaactccgtctgtaccaaaaatacaaaaattacctgggcatggtggtacgtgcctgtaatcccagctacttggcaggctgaggcaggagcattgcttgaacccatgaggtggaggttgcagtgagccgagatcacgccactgcactcaagcctgggtgacagagcaagactccatctctactacaaaaaaaaaaaaaaaaaaaattcaaccaccttaggaagcctctcatttatgtatttctagcatgtaattagtgttgcacatgggaagggctaatagatgctgacagagtgaacaactta

SEQ ID NO: 1585 - DNA, 2232 bp, Homo sapiens
cttccccttctctgccctgctccaggcaccaggctctttccccttcagtgtctcagaggaggggacggcagcaccatggacccccgcttgtccactgtccgccagacctgctgctgcttcaatgtccgcatcgcaaccaccgccctggccatctaccatgtgatcatgagcgtcttgttgttcatcgagcactcagtagaggtggcccatggcaaggcgtcctgcaagctctcccagatgggctacctcaggatcgctgacctgatctccagcttcctgctcatcaccatgctcttcatcatcagcctgagcctactgatcggcgtagtcaagaaccgggagaagtacctgctgcccttcctgtccctgcaaatcatggactatctcctgtgcctgctcaccctgctgggctcctacattgagctgcccgcctacctcaagttggcctcccggagccgtgctagctcctccaagttccccctgatgacgctgcagctgctggacttctgcctgagcatcctgaccctctgcagctcctacatggaagtgcccacctatctcaacttcaagtccatgaaccacatgaattacctccccagccaggaggatatgcctcataaccagttcatcaagatgatgatcatcttttccatcgccttcatcactgtccttatcttcaaggtctacatgttcaagtgcgtgtggcggtgctacagattgatcaagtgcatgaactcggtggaggagaagagaaactccaagatgctccagaaggtggtcctgccgtcctacgaggaagccctgtctttgccatcgaagaccccagaggggggcccagcaccacccccatactcagaggtgtgaccctcgccaggccccagccccagtgctgggaggggtggagctgcctcataatctgcttttttgctttggtggcccctgtggcctgggtgggccctcccgcccctccctggcaggacaatctgcttgtgtctccctcgctggcctgctcctcctgcagggcctgtgagctgctcacaactgggtcaacgctttaggctgagtcactcctcgggtctctccataattcagcccaacaatgcttggtttatttcaatcagctctgacacttgtttagacgattggccattctaaagttggtgagtttgtcaagcaactatcgacttgatcagttcagccaagcaactgacaaatcaaaaacccacttgtcagttcagtaaaataatttggtcaaacaacagtctattgcattgatttataaatagttgtcagttcacatagcaatttaatcaagtaatcattaattagttaccccctatatataaatatatgtaatcaatttcttcaaatagcttgcttacatgataatcaattagccaaccatgagtcatttagaatagtgataaatagaatacacagaatagtgatgaaattcaatttaaaaaatcacgttagcctccaaaccatttaattcaaatgaacccatcaactggatgccaactctggcgaatgtaggacctctgagtggctgtataattgttaattcaaatgaaattcatttaaacagttgacaaactgtcattcaacaattagctccaggaaataacagttatttcatcataaaacagtcccttcaaacacacaattgttctgctgaagagttgtcatcaacaatccaatgctcacctattcagttgctctgtggtcagtgtggctgcatagcagtggattccatgaaaggagtcattttagtgatgagctgccagtccattcccaggccaggctgtcgctggccatccattcagtcgattcagtcataggcgaatctgttctgcccgaggcttgtggtcaagcaaaaattcagccctgaaatcaggcacatctgttcgttggactaaacccacaggttagttcagtcaaagcaggcaacccccttgtgggcactgaccctgccactggggtcatggcggttgtggcagctggggaggtttggccccaacagccctcctgtgcctgcttccctgtgtgtcggggtcctccagggagctgacccagaggtggaggccacggaggcagggtctctggggactgtcggggggtacagagggagaaggctctgcaagagctccctggcaatacccccttgtgtaattgctttgtgtgcgacagggaggaagtttcaataaagcaacaacaagcttcaaggaattc

SEQ ID NO: 1586 - DNA, 760 bp, Homo sapiens
gagttttcatttgtggtgagattctctcccaggccacaagacatttcctgctcggaaccttgtttactaatttccactgcttttaaggccctgcactgaaaatgcaagctcaggcgccggtggtcgttgtgacccaacctggagtcggtcccggtccggccccccagaactccaactggcagacaggcatgtgtgactgtttcagcgactgcggagtctgtctctgtggcacattttgtttcccgtgccttgggtgtcaagttgcagctgatatgaatgaatgctgtctgtgtggaacaagcgtcgcaatgaggactctctacaggacccgatatggcatccctggatctatttgtgatgactatatggcaactctttgctgtcctcattgtactctttgccaaatcaagagagatatcaacagaaggagagccatgcgtactttctaaaaactgatggtgaaaagctcttaccgaagcaacaaaattcagcagacacctcttcagcttgagttcttcaccatcttttgcaactgaaatatgatggatatgcttaagtacaactgatggcatgaaaaaaatcaaatttttgatttattataaatgaatgttgtccctgaacttagctaaatggtgcaacttagtttctccttgctttcatattatcgaatttcctggcttataaactttttaaattacatttgaaatataaaccaaatgaaatattttaactgataaaaaaaaaaaaaaaaaataaaaaa

SEQ ID NO: 1587 - DNA, 2227 bp, Homo sapiens
cgcgcgggccgggcctgcccctccgaggcgccgtagcgcgggagggaggcggcggcgctgtggtccgtgggtccgccggtccgtgggtctgcccggccgcccggccccgccctgccccccggggcggctcggctccatggcccgcggcggcggcggcggcggcggcggcgggaggcgacccgggggccgcggtggccgctgaccgggcggcgggaggcggcggggccgggccatgggggacggaaccgtccgcagccgccggagccgggagccctgcccaagtcggagcggcgtcccctgctgagccccgagcgccgggccagcagccggatgcccgggcccactgggcgggccagtggccgcctgcgggatgagcagactgctgggggggacgctggagcgcgtctgcaaggctgtgctccttctctgcctgctgcacttcctcgtggccgtcatcctctactttgacgtctacgcccagcacctggccttcttcagccgcttcagtgcccgaggccctgcccatgccctccacccagctgctagcagcagcagcagcagcagcaactgctcccggcccaacgccaccgcctctagctccgggctccctgaggtccccagtgccctgcccggtcccacggctcccacgctgccaccctgtcctgactcgccacctggtcttgtgggcagactgctgatcgagttcacctcacccatgcccctggagcgggtgcagagggagaacccaggcgtgctcatgggcggccgatacacaccgcccgactgcaccccagcccagacggtggcggtcatcatcccctttagacaccgggaacaccacctgcgctactggctccactatctacaccccatcttgaggcggcagcggctgcgctacggcgtctatgtcatcaaccagcatggtgaggacaccttcaaccgggccaagctgcttaacgtgggcttcctagaggcgctgaaggaggatgccgcctatgactgcttcatcttcagcgatgtggacctggtccccatggatgaccgcaacctataccgctgcggcgaccaaccccgccactttgccattgccatggacaagtttggcttccggcttccctatgctggctactttggaggtgtgtcaggcctgagtaaggctcagtttctgagaatcaatggcttccccaatgagtactggggctggggtggcgaggatgatgacatcttcaaccggatctccctgactgggatgaagatctcacgcccagacatccgaatcggccgctaccgcatgatcaagcacgaccgcgacaagcataacgaacctaaccctcagaggtttaccaagattcaaaacacgaagctgaccatgaagcgggacggcattgggtcagtgcggtaccaggtcttggaggtgtctcggcaaccactcttcaccaatatcacagtggacattgggcggcctccgtcgtggccccctcggggctgacactaatggacagaggctctcggtgccgaagattgcctgccagaggactgaccacagcctggctggcagctgctctgtggaggacctccaggactgagactgggctctgttttccaagggtcttcactaggccccctagctacacctggaagtttcagaacccactttggggggcctcctgcctgggcaggctcttcaagtgtggccctctttggagtcaaccctccttcccgaccccctccccctagcccagccccagtcactgtcagggtcgggccagcccctgcactgcctcgcagagtggcctgggctaggtcactccacctctctgtgcctcagtttcccccccttgagtcccctagggcctggaagggtgggaggtatgtctagggggcagtgtctcttccagggggaattctcagctcttgggaacccccttgctcccaggggaggggaaacctttttcattcaacattgtagggggcaagctttggtgcgccccctgctgaggagcagccccaggaggggaccagaggggatgctgtgtcgctgcctgggatcttggggttggcctttgcatgggaggcaggtggggcttggatcagtaagtctggttcccgcctccctgtctgagagaggaggcaggagccccagggccggcttgtgtttgtacattgcacagaaacttgtgtgggtgctttagtaaaaaacgtgaatggaaaaaaaaaaaaaaaaaaa

SEQ ID NO: 1588 - DNA, 970 bp, Homo sapiens
ctcccctcaccccggtccaggatgcccagtccccacgacacctcccacttcccactgtggcctgggtgggctcaggggctgcccttgacctggcctagagccctcccccagctggtggtggagctggcactctctgggagggagggggctgggagggaatgagtgggaatggcaagaggccagggtttggtgggatcaggttgaggcaggtttggtttccttaaaatgccaagttgggggccagtggggcccacatataaatcctcaccctgggagcctggctgccttgctctccttcctgggtctgtctctgccacctggtctgccacagatccatgatgtgcagttctctggagcaggcgctggctgtgctggtcactaccttccacaagtactcctgccaagagggcgacaagttcaagctgagtaagggggaaatgaaggaacttctgcacaaggagctgcccagctttgtgggggagaaagtggatgaggaggggctgaagaagctgatgggcagcctggatgagaacagtgaccagcaggtggacttccaggagtatgctgttttcctggcactcatcactgtcatgtgcaatgacttcttccagggctgcccagaccgaccctgaagcagaactcttgacttcctgccatggatctcttgggcccaggactgttgatgcctttgagttttgtattcaataaactttttttgtctgttgataatattttaattgctcagtgatgttccataacccggctggctcagctggagtgctgggagatgagggcctcctggatcctgctcccttctgggctctgactctcctggaaatctctccaaggccagagctatgctttaggtctcaattttggaatttcaaacaccagcaaaaaattggaaatcgagataggttgctgacttttattttgtcaaataaagatattaaaaaaggcaaaaaaaaaa

SEQ ID NO: 1589 - DNA, 5355 bp, Homo sapiens; identical to SEQ ID NO: 1357

SEQ ID NO: 1590 - DNA, 418 bp, Homo sapiens
gcaagatggcgccgtccgccttgctgcgtcccctttcccggctgctggcccccgccaggctcccgagcggcccttcagtgcgatcaaagttctacgtgcgagagccgccgaatgccaaacctgactggctgaaagttgggttcaccttgggcaccactgtcttcttgtggatctatctcatcaaacaacacaatgaagatattttagagtacaaaagaagaaatgggctggaataaacttttgaaacactaatgtagtatgctccgtatagtgattgtagctgttcctctggattcaccatctgttgagttgtaaatgtgagagaaaaagttatatgtgaatatatatcaagccagcatttgtattttgcatcattaaataaaaagaaataaaaatacttctgtattcttcaaaaaaa

SEQ ID NO: 1591 - DNA, 2941 bp, Homo sapiens
cctgtggccgctcccggctcggagtgtgatctaagcaggttgcgtaccttcctcaggtgactccggccacagcccattgtccgcggccaccggcggagtttagccgcagacctcgaagcgccccggggtccttcccgaacggcagcggctgcggcgggtccatggagaagggccctgtgcgggcaccggcggagaagccgcggggcgccaggtgcagcaatgggttccccgagcgggatccgccgcggcccgggcccagcaggccggcggagaagcccccgcggcccgaggccaagagcgcgcagcccgcggacggctggaagggcgagcggccccgcagcgaggaggataacgagctgaacctccctaacctggcagccgcctactcgtccatcctgagctcgctgggcgagaacccccagcggcaagggctgctcaagacgccctggagggcggcctcggccatgcagttcttcaccaagggctaccaggagaccatctcagatgtcctaaacgatgctatatttgatgaagatcatgatgagatggtgattgtgaaggacatagacatgttttccatgtgtgagcatcacttggttccatttgttggaaaggtccatattggttatcttcctaacaagcaagtccttggcctcagcaaacttgcgaggattgtagaaatctatagtagaagactacaagttcaggagcgccttacaaaacaaattgctgtagcaatcacggaagccttgcggcctgctggagtcggggtagtggttgaagcaacacacatgtgtatggtaatgcgaggtgtacagaaaatgaacagcaaaactgtgaccagcacaatgttgggtgtgttccgggaggatccaaagactcgggaagagttcctgactctcattaggagctgagcttcattcagtgtgtgtgcgttggttgccgatcgtactgccagtagcattgtctgtctgtccggtcttgtttgtacattccattttcaattgttacagatgtgaactttattccttgtcactaattatatttaaaattatttctaggaagtcaaataaatataataaagggttgagccctctactttcttcttgccacctttttgtggcaatattaaagtgaactgctaatagtgtaagtacgtgcacaaaaccactgccagataaccagaggggcctgggaagggagaagaattagtgtatttttttcaaatagtacagtaatttgcctcataagcataggagcattgggaatgagagggaactgtgcccagtatactgttttttttcttcctccaataaaagtggtgtagtgccgaaagtgctaaaatatttagtgcggtattgctctgtgaattcaagttcaacagacttcactttggtcatgtttattaaaccaccagtgacatttaaaaatatatttttagcagtcgtaatgttagtcaccaagggaaggtggtggaatgtctatgtttttgattttactgtgagttaaaaaggcacatttctaccttctattgtttttaaattcaagaatagggaattagttcctggtgttgtttacgagtgtattctcgtgtcaacatacagggatttagacatttaactctctgtgccttgataagaatatcatttagagtgtagatacttttgcctttttaaaaaagccattattttatgagacttagtactcacactgcaaataactagtcagctcagttttaactttataggtttattgagtttcctttgtgtgatccatgtagatgcctcaaaatgtttcttcttcttcttttttttaatcttataagatatttttctaagtatttccagaaacatttgagagtgcccatcattttcaggtctgcagaaccatagcttccacgcacctgaacgagcacagaatgaactgacggtggaagacattatgagctgtgtccaacgttttaaccaaagcgtatcgtaccaacgatctgtgaaaatgcactggaagcttctggtcccggtttcctttgtggtctatgtgggtcttgtcctcattgtaactccgtatagatggtataggtattttaatcctggaagctgttgccttattaatgattatcttaaaatttcctccattggggcagcgtgggccaaattaaaacaaacaaaaccgcaactcctccacagaaacacaaacacagttattccatgaagtttagtatttggttgacatagtgctcttcaaattcatcccattaccctaaaagtaataactttgatgcttgctttaactttagtcccatctctgccactttgatgctatttgggttatgatggggcaagatggcagaggtattgggtttttttgtttttttccattcctctctacttctgtttcctagctttttctttctggagtttaagtacagtgatggttggcttgagtacctttttaaatctagcccagtataaacattagcctgcttaatatttagacatttataggtagaattctgagcactcaactcatgtttggcattttaaagtaaaaacaagtgtgacttcgaggaccaaagaaattgtcagctatacatttatctttatgaactcatttatattcctttttaatgactcgttgttctaacatttcctagaagtgttcttataaaggtctaatgtatccacaggctgttgtcttattagtaaatgcaaagtaatgactttgtctgttttactctagtctttagtacttcaaaattaccttttcatatccatgatcttgagtccatttgggggatttttaagaatttgatgtatttcaatacactgttcaaaattaaattgtttaattttatgtatgagtatgtatgttcctgaagttggtcctatttaaattattaaactattgtaactttgttcttgtgaaaaaaaaaaaaaaaaaa

SEQ ID NO: 1592 - DNA, 3114 bp, Homo sapiens
ctcacaacgtgtgttgctttccgctcctcggaacatccgggagagttgacttccggcggcttgtgggagtgctggttctgtcctccttgcgggtgcggagatggttgtcttggttacgggtcctaacggtcccctgccttgaaatcccttgttgagggcctgcaaccttgtgcttccgactggagacgcctttggtccctcggtgtctgcactggctgctggtcaaggcttcagtgtggagtaattgacactttcgagaatattaaaatcaaattagagaagaaaactgatccataataataaaaatgtctcgaaaaatttcaaaggagtcaaaaaaagtgaacatctctagttctctggaatctgaagatattagtttagaaacaacagttcctacggatgatatttcctcatcagaagagcgagagggcaaagtcagaatcaccaggcagctaattgaacgaaaagaactacttcataatattcagttactaaaaattgagctatcccagaaaactatgatgatcgacaatttgaaagtggattatcttacaaagattgaagaattggaggagaaacttaatgatgcacttcaccagaagcagctactaacattgagattagacaaccaattggcttttcaacagaaagatgccagcaaatatcaagaattaatgaaacaagaaatggaaaccattttgttgagacagaaacaactagaagagacaaatcttcagctaagagaaaaagctggagatgttcgtcgaaacctgcgtgactttgagttgacagaagagcaatatattaaattaaaagcttttcctgaagatcagctttctattcctgaatatgtatctgttcgcttctatgagctagtgaatccattaagaaaggaaatctgtgaactacaagtgaaaaagaatatcctagcagaagaattaagtacaaacaaaaaccaactgaagcagctgacagagacatatgaggaagatcgaaaaaactactctgaagttcaaattagatgtcaacgtttggccttagaattagcagacacaaaacagttaattcagcaaggtgactaccgtcaagagaactatgataaagtcaagagtgaacgtgatgcacttgaacaggaagtaattgagcttaggagaaaacatgaaatacttgaagcctctcacatgattcaaacaaaagaacgaagtgaattatcaaaagaggtagtcaccttagagcaaactgttactttactgcaaaaggataaagaatatcttaatcgccaaaacatggagcttagtgttcgctgtgctcatgaagaggatcgccttgaaagacttcaagctcaactggaagaaagcaaaaaggctagagaagagatgtatgaaaaatatgtagcatccagagaccattataaaacagaatatgaaaataaactacatgatgaactagaacaaatcagattgaaaaccaaccaagaaattgatcaacttcgaaatgcctctagggaaatgtatgaacgagaaaacagaaatctccgagaagcaagggataatgctgtggctgaaaaggaacgagcagtgatggctgaaaaggatgctttagaaaaacacgatcagctcttagacaggtacagagaactacaacttagtacagaaagcaaagtaacagaatttctccatcaaagtaaattaaaatcttttgaaagtgagcgtgttcaacttctgcaagaggaaacagcaagaaatctcacacagtgtcaattggaatgtgaaaaatatcagaaaaaattggaggttttaaccaaagaattttatagtctccaagcctcttctgaaaaacgcattactgaacttcaagcacagaactcagagcatcaagcaaggctagacatttatgagaaactggaaaaagagcttgatgaaataataatgcaaactgcagaaattgaaaatgaagatgaggctgaaagggttcttttttcctacggctatggtgctaatgttcccacaacagccaaaagacgactaaagcaaagtgttcacttggcaagaagagtgcttcaattagaaaaacaaaactcgctgattttaaaagatctggaacatcgaaaggaccaagtaacacagctttcacaagagcttgacagagccaattcgctattaaaccagactcaacagccttacaggtatctcattgaatcagtgcgtcagagagattctaagattgattcactgacggaatctattgcacaacttgagaaagatgtcagcaacttaaataaagaaaagtcagctttactacagacgaagaatcaaatggcattagatttagaacaacttctaaatcatcgtgaggaattggcagcaatgaaacagattctcgttaagatgcatagtaaacattctgagaacagcttacttctcactaaaacagaaccaaaacatgtgacagaaaatcagaaatcaaagactttgaatgtgcctaaagagcatgaagacaatatatttacacctaaaccaacactctttactaaaaaagaagcacctgagtggtctaagaaacaaaagatgaagacctagtgttttggatgggaagcacctgtagaccattatatactcctgaagttctttttctgatggaaaacaaaattcagcttaatcgtgtactcagcattttttaaataacaatgtttatttgaactaatattaaattaacaaattcagtgtaatcaaaatgtgtaaagaacaatcaatatactttatttttttttctattttataaaataaatatatatgctatgctttaaattttggagctttcataaatgttcaatgcattttaagtgtgtggcttataaatattttggtatttttctatactacgtaaattctgagtttaaatgtcatacacaaatactaagacactttgcatttttaaaaattaagaatcatttgtgaagtccactacgaggtacttcaaaagcccagtaatggtggtcagataccatgtagatggatacagattgttgactcttttgaagttgtttttttcttatattttatattaccattaaccaataaaatctggcagaaagtctgctattccattggtaaa

SEQ ID NO: 1593 - DNA, 1604 bp, Homo sapiens; identical to SEQ ID NO: 757

SEQ ID NO: 1594 - DNA, 2134 bp, Homo sapiens
gcacgagcgccggttcagcgcagcccggagtcgcccaggcctgaactcctacccaggtccccggcccccgccccgggcccgcgaggacaccggaggccaccccccgggggtggggagcggagccgcggcctagactcaagtctgggtttcagctgccgccagccctattgctgctgttgctgttctctgtccttggcccaggggctggaggccttttcctgactgattactccacctgctcaccccgcaagctgagtcctttccgctcctttgccagcaccgagctcttccacttccatgttcctgaggacacattcctggctgtttggaacctcatcatcttcaaggagcaagggggaacttttggggaccactgcccagaccaaagtgtgactgtgtatttccggtccggggcaccccctgtcatcaatcccctgcatacacacttcccaggggacacagctgtgcctggggttttctcactgaccctcagctggacactgcccaaccgcacctcaggcatctttaacgtcagcagccccttacctggggactggttcttggctgcccaccttccccaggcccacggccacatctctgtcaagggtctccaggatgagtgtcagtacctccttcagccgcagctgattgtccggcgtttgctggacgtcgctgtgctggttcctggccggccctcagagcaaaccctctccccacacaatcgctcagccctgtacaaggtctttgtgcccagcttcacttacagggtttcagcacagctggtgtgtgtggggggccgtggggtatctgcctgccccctgtcactgcgtctgcgtcccaaagccccacccctgcacaactcaagctctgtggcctgtggaggtgcctcaggatgccagctggagctggcactgcccccctgggggcactgggtctacgtgcgtgtggaaacatcatcccggggccctggtaggaccatccgcttccagctgtgtgtgcagttgcaagagtgcccacagcccggcctgctccgagccctggtccctggagctgccatgaacatgccccagtccctgggcaaccagccactgcccccagaaccgccatcccttggaacccctgcggaggggcctgggaccacgtccccacccgagcactgctggccagtgcgcccgactctgcgcaacgagctggacaccttctctgtccacttctacatcttctttggcccaagtgtggcccttccccctgagcgcccagccgtgttcgccatgaggctgttgccagtgctggacagtggaggcgtcctcagcctggagctccagctcaatgcgagctccgtgcgccaggaaaacgtgacggtgtttggatgcttgactcacgaggtgcccttgagcctgggggatgcagcagtgacctgttccaaagagtccctggccggcttcctcctctctgtcagtgccaccaccagggttgccaggctgcgaatcccattcccgcagacggggacctggttcctggccctccgctccctgtgcggggtggggcctcggttcgtgcggtgccgcaacgcgacggccgaggtgcggatgcgcaccttcctgtccccatgcgtggacgactgcgggccctacggccagtgcaagctgctgcgcacacacaattatctgtacgcagcctgcgagtgcaaggccgggtggagaggctggggctgcaccgacagtgcagatgcgctcacctatggattccagctgctgtccacactcctgctctgcctgagcaacctcatgtttctgccacctgtggtcctggccattcggagtcgatatgtgctggaagctgcagtctacaccttcaccatgttcttctccacggtatgcggtggtgtctgcatcttatcactgggtgcttgtgcatggtggtgggtcacagtctgtatttccaccacgttctccgagggtttgggaatgtctgtgccttcactgtgtcttctacagacagagacagcagtgcttcccaaactgtcatgcatagataatggtcatttttgtaagacacattggagtaaatgaacaaaactgtttgcaacttaataaagtaagtttgggcctccaaaaaaaaaaaaaaaaaaaaa

SEQ ID NO: 1595 - DNA, 3349 bp, Homo sapiens
ggtggactgagccgctcgggacagcggcaccggaggaggctcggagaagatgcggggctcggggccccggggtgcgggacaccggcggcccccaagcggcggcggcgacacccccatcaccccagcgtccctggccggctgctactctgcacctcgacgggctcccctctggacgtgccttctcctgtgcgccgcactccggaccctcctggccagccccagcaacgaagtgaatttattggattcacgcactgtcatgggggacctgggatggattgcttttccaaaaaatgggtgggaagagattggtgaagtggatgaaaattatgcccctatccacacataccaagtatgcaaagtgatggaacagaatcagaataactggcttttgaccagttggatctccaatgaaggtgcttccagaatcttcatagaactcaaatttaccctgcgggactgcaacagccttcctggaggactggggacctgtaaggaaacctttaatatgtattactttgagtcagatgatcagaatgggagaaacatcaaggaaaaccaatacatcaaaattgataccattgctgccgatgaaagctttacagaacttgatcttggtgaccgtgttatgaaactgaatacagaggtcagagatgtaggacctctaagcaaaaagggattttatcttgcttttcaagatgttggtgcttgcattgctctggtttctgtgcgtgtatactataaaaaatgcccttctgtggtacgacacttggctgtcttccctgacaccatcactggagctgattcttcccaattgctcgaagtgtcaggctcctgtgtcaaccattctgtgaccgatgaacctcccaaaatgcactgcagcgccgaaggggagtggctggtgcccatcgggaaatgcatgtgcaaggcaggatatgaagagaaaaatggcacctgtcaagtgtgcagacctgggttcttcaaagcctcacctcacatccagagctgcggcaaatgtccacctcacagttatacccatgaggaagcttcaacctcttgtgtctgtgaaaaggattatttcaggagagagtctgatccacccacaatggcatgcacaagacccccctctgctcctcggaatgccatctcaaatgttaatgaaactagtgtctttctggaatggattccgcctgctgacactggtggaaggaaagacgtgtcatattatattgcatgcaagaagtgcaactcccatgcaggtgtgtgtgaggagtgtggcggtcatgtcaggtaccttccccggcaaagcggcctgaaaaacacctctgtcatgatggtggatctactcgctcacacaaactatacctttgagattgaggcagtgaatggagtgtccgacttgagcccaggagcccggcagtatgtgtctgtaaatgtaaccacaaatcaagcagctccatctccagtcaccaatgtgaaaaaagggaaaattgcaaaaaacagcatctctttgtcttggcaagaaccagatcgtcccaatggaatcatcctagagtatgaaatcaagtattttgaaaaggaccaagagaccagctacacgattatcaaatctaaagagacaactattactgcagagggcttgaaaccagcttcagtttatgtcttccaaattcgagcacgtacagcagcaggctatggtgtcttcagtcgaagatttgagtttgaaaccaccccagtgtttgcagcatccagcgatcaaagccagattcctgtaattgctgtgtctgtgacagtgggagtcattttgttggcagtggttatcggcgtcctcctcagtggaagttgctgcgaatgtggctgtgggagggcttcttccctgtgcgctgttgcccatccaagcctaatatggcggtgtggctacagcaaagcaaaacaagatccagaagaggaaaagatgcattttcataatgggcacattaaactgccaggagtaagaacttacattgatccacatacctatgaggatcccaatcaagctgtccacgaatttgctaaggagatagaagcatcatgtatcaccattgagagagttattggagcaggtgaatttggtgaagtttgtagtggacgtttgaaactaccaggaaaaagagaattacctgtggctatcaaaacccttaaagtaggctatactgaaaagcaacgcagagatttcctaggtgaagcaagtatcatgggacagtttgatcatcctaacatcatccatttagaaggtgtggtgaccaaaagtaaaccagtgatgatcgtgacagagtatatggagaatggctctttagatacatttttgaagaaaaacgatgggcagttcactgtgattcagcttgttggcatgctgagaggtatctctgcaggaatgaagtacctttctgacatgggctatgtgcatagagatcttgctgccagaaacatcttaatcaacagtaaccttgtgtgcaaagtgtctgactttggactttcccgggtactggaagatgatcccgaggcagcctacaccacaaggggaggaaaaattccaatcagatggactgccccagaagcaatagctttccgaaagtttacttctgccagtgatgtctggagttatggaatagtaatgtgggaagttgtgtcttatggagagagaccctactgggagatgaccaatcaagatgtgattaaagcggtagaggaaggctatcgtctgccaagccccatggattgtcctgctgctctctatcagttaatgctggattgctggcagaaagagcgaaatagcaggcccaagtttgatgaaatagtcaacatgttggacaagctgatacgtaacccaagtagtctgaagacgctggttaatgcatcctgcagagtatctaatttattggcagaacatagcccactaggatctggggcctacagatcagtaggtgaatggctagaggcaatcaagatgggccggtatacagagattttcatggaaaatggatacagttcaatggacgctgtggctcaggtgaccttggaggatttgagacggcttggagtgactcttgtcggtcaccagaagaagatcatgaacagccttcaagaaatgaaggtgcagctggtaaacggaatggtgccattgtaacttcatgtaaatgtcgcttcttcaagtgaatgattctgcactttgtaaacagcactgagatttattttaacaaaaaaagggggaaaagggaaaacagtgatttctaaaccttagaaaacatttgcctcagccacagaatttgtaatcatggttttactgaagtatccagttcttagtccttagtct

SEQ ID NO: 1596 - DNA, 876 bp, Homo sapiens
gcgcagaagcggcggcggtggtggcttgtggtgcggcctcaccatacaggaacagggcagacgttagcgtgagtgatcactctcaatcccggggacctggtggccttagtctttcaggtggaacggtgtgcgacatgggaaagaaaaccaagcggacagctgacagttcttcttcagaggatgaggaggagtatgttgtggagaaggtgctagacaggcgcgtggttaagggacaagtggaatatctactgaagtggaaaggcttttctgaggagcacaatacttgggaacctgagaaaaacttggattgccctgagctaatttctgaatttatgaaaaagtataagaagatgaaggagggtgaaaataataaacccagggagaagtcagaaagtaacaagaggaaatccaatttctcaaacagtgccgatgacatcaaatctaaaaaaaagagagagcagagcaatgatatcgctcggggctttgagagaggactggaaccagaaaagatcattggggcaacagattcctgtggtgatttaatgttcctaatgaaatggaaagacacagatgaagctgacctggttcttgcaaaagaagctaatgtgaaatgtccacaaattgtgatagcattttatgaagagagactgacatggcatgcatatcctgaggatgcggaaaacaaagagaaagaaacagcaaagagctaaaggaggggatggtctctgtcatttctctttgtacataatacattcacctccctgcctcctctcctttctacccacccctttctatcctaaacacatccataaaaaatgtgcttatcactgtgctccacaaaaaaaaaaaaaaaaaaaaaaaaaaaaaaaaaaaaaa

SEQ ID NO: 1597 - DNA, 3433 bp, Homo sapiens; identical to SEQ ID NO: 570

SEQ ID NO: 1598 - DNA, 5220 bp, Homo sapiens
ggcctcgcctgcggccgctccctccgcctcctccccgccccgagccccagtcagcccgtcttccttcccctcccttgcatgatggaaacaccatggctgcggcggcccagctctctctgacacagttatcaagtgggaatcctgtatatgaaaaatactatagacaggttgatacaggcaatactggaagggtgttggcttctgatgctgctgctttcctgaaaaaatcagggcttccagacttgatacttggaaagatttgggatttagccgacacagatggcaaaggtatcctgaacaaacaagaattctttgttgctttgcgtcttgtggcatgtgcccagaatggattggaagtttcactaagtagtttgaacctggctgttcctccaccaagatttcatgataccagtagtcctttgctaatcagtggaacctctgcagctgagctcccatgggctgtaaaacctgaagataaggccaaatatgatgcaatatttgatagtttaagcccagtgaatggatttctgtctggtgataaagtgaaaccagtgttgctcaactctaagttacctgtggatatccttggaagagtttgggagttgagtgatattgaccatgatggaatgcttgacagagatgagtttgcagttgccatgtttttggtatactgtgcactggagaaagaacctgtgccaatgtccttgcctccagccttggtgccaccatctaagagaaaaacgtgggttgtatcccctgcagaaaaagctaaatatgatgaaatcttcctgaaaactgataaagatatggacggatttgtgtctggattggaggtccgtgaaatattcttgaaaacaggtttaccttctaccttactagcccatatatggtcattatgcgacacaaaggactgtgggaagctttcaaaggatcagtttgccttggcttttcacttaatcagtcagaagttaatcaagggcattgatcctcctcacgttcttactcctgaaatgattccaccatcagacagggccagtttacaaaagaacatcataggatcaagtcctgttgcagatttctctgctattaaggaactagatactcttaacaatgaaatagttgacctacagagggaaaagaataatgtggaacaggaccttaaggagaaggaagatactattaaacagaggacaagtgaggttcaggatcttcaagatgaagttcaaagggagaatactaatctgcaaaaactacaggcccagaaacagcaggtacaggaactccttgatgaactggatgagcagaaagcccagctggaggagcaactcaaggaagtcagaaagaaatgtgctgaggaggcccaactgatctcttctctgaaagctgaattaactagtcaggaatcgcagatctccacttacgaagaagaattggcaaaagctagagaagagctgagccgtctacagcaagaaacagcagaattggaggagagtgtagagtcagggaaggctcagttggaacctcttcagcagcacctacaagattcacaacaggaaattagttcaatgcaaatgaaactgatggaaatgaaagatttggaaaatcataatagtcagttaaattggtgcagtagcccacacagcattcttgtaaacggagctacagattattgcagcctcagcaccagcagcagtgaaacagccaaccttaatgaacatgttgaaggccagagcaacctagagtctgagcccatacaccaggaatctccagcaagaagtagtcctgaactactgccttctggtgtgactgatgaaaatgaggtgactacagctgttactgaaaaagtttgttctgaactcgacaataatagacattcaaaagaggaagatccatttaatgtagactcaagttcgctgacaggtccagttgcagatacaaacttggattttttccagtctgatccttttgttggcagtgatcctttcaaggatgatccttttggaaaaatcgatccatttggtggtgatcctttcaaaggttcagatccatttgcatcagactgtttcttcaggcaatctactgatccttttgccacttcaagcactgaccctttcagtgcagccaacaatagcagtattacatcggtagaaacgttgaagcacaatgatccttttgctcctggtggaacagttgttgcagcaagcgattcagccacagacccctttgcttctgtttttgggaatgaatcatttggaggtggatttgctgacttcagcacattgtcaaaggtcaacaatgaagatccttttcgttcagccacatcgagctctgtcagcaacgtagtgattacaaaaaatgtatttgaggaaacatcggtcaaaagtgaagatgaacccccagcactgccaccaaagatcggaactccaacaagaccctgccctctaccacctgggaaaagatccatcaacaaattggattctcctgatccctttaaactgaatgatccatttcagcctttcccaggcaacgatagccccaaagaaaaagatcctgaaatattttgtgatccattcacttctgctactaccactaccaataaagaggctgatccaagcaattttgccaacttcagtgcttatccctctgaagaagatatgatcgaatgggccaagagggaaagtgagagagaggaagagcagaggcttgcccgactaaatcagcaggaacaagaagacttagaactggctattgcactcagcaaatctgagatatcagaagcatgaagaattctcttgttctttggcaacaatatagtattcttcttcctgaatactgaaactatttacaatgtgtatcaaaactacctgtgagcatgggaatacaaaaggtttgagattcctgtaaatgtgacaaaattttaggattttttttttttcttcattacagattcgtctttttttttttttcttataaaagccgtaacccagtcagacaaattcaccttcacttaggcccctgttctggtatacatttactgtgagcttttgcctgcctgtgctattttacttgtaaagctagagcacccaagcttctgccttctggaatatagagaaatagtttcaccctgcactaccctgttctgtagttattctgatgatagccagtgaggttcttaaagtttgcagtattctcccctgattggaatggttgagtgagggtaagggaaagaatatcttatttcttttatgattggtgcaaattggctaaagtgcatttttaaatttcctctacttaatttgtttttcagagataaggaaaaatattttgcacagatttactccactatggaaaagggatgctgtaggttgaaccattatagcctcagattcgatcttttcctaactaaaaatattaaagcctcatgtgtgaaataaatttttaaaaagatttatctggatttagagaattttagatcaacagatacctctcagtgtgtttgctaattaataaaaatcagtttcttacaaataaagtttgtaagaaaatgttcattttaagtgatagatagtggagaaaatttatcacctaaaatatacccatcagtataaggcaagcaaaagtcttaacatggcagccattctgcctttgccgtggccctgtcctgtttagttcttagtgggttaatttttgtacttttgcagaagaaacttcagcaagctagaactggaaggtactttaatttttcatatatatttgtttttttttttttaatgaaggctcatttacttgaaatgtaaaaactttcactgaatacaaatagaaaaagtgatgtgttttatatcatattgctttttgtccatctttgtggtttagtttatttactcacttcatgtttttcacctataaaattgtcaagctagcaaaaaaactcttgtttttttaattgggagagaagagacctgccagattatcagacctcttcatgttaaaagaccatctcctgtaaaactgacctagtggacaagctgaatttgaaatagactgtgaagtaagctgtaacttgtcattttaattttgtttaacacggttactgacttagatgatgtattaaataccaagataaagaaaaatgcacctaaaatctaattagaattctctgggtcaacaagtcaaggtggtattgatctgtgttaatctgagtaacttattgcctagcctataaataaattccaaaatatccaattcatttcttcttgaaatggtgcttgttttgttttctttccattacacaattagactcctacagtttaaaacaaactttaaaccactatcttgcactgctaacttttttctacctttgtaaatagaaacatttctgcataaaagtcatacatatgaagcaagggctgaatcataatcacaaggcttaattttgataaacgaatccagtgacctaaggattttctgcaaaatttgactgggagttgtgataggtggtatttttgtttattttcttcctcttactccttaggataaaggtaagttgacttgaacaactttcttttgcactgggaaaataagcaaatgtttaaatgcttcaaaaaaattttcaattaaactcaaatattaaatatctataacttataaacaccaactttcaatgtaataaatgtatcctaatcttatgtatgtttaactggattacatagatttttatcttttgttaaaatgtgtataccccgtggaccaacataatattaaagtatgtatatattatataaatatatatgtatatgtgctcgcttgtgtaggatgaatgtcttagagtcgtttgtggtattttatgttgttgactctggctccagggcctgtgcttgaaaaggacagataagtattgcccagagctaagtggcactacttacaaagttttaaatgtcttctacatactgattcatgtttatttgagctctctttatagaattttctcttaaagtttcaaacctctaagttgtagcctgtaattatgagaacagtaaactttaagtaataataaagaatcccatccatatatccaatttgcaattgagttttgcatggttctctgattatgtccatgctgtgtccaaggaggagtaggtacatacaatcagcacagattaatatatgtaaagggtttgggacagcacctggtatagaataaataataaatgtaaactatta

SEQ ID NO: 1599 - DNA, 2033 bp, Homo sapiens
cctccttccagtgcccggcgttcctcccttccccctcgccgccgaccgagttcttccttttcagaccgggtcgccttgctgtcgtcgcggtgattttcctgctactgctactgctgctgctgccaccgccactaccactgggctcatttgccccgaccccttcccgccgccccgcccccagccccacacaagatgtcagaggatttagcaaagcagctggcaagctacaaagctcagctccagcaagttgaagctgcattatctggaaatggagaaaatgaagatttgctaaaattgaagaaagatttacaagaagttatagaactaaccaaagaccttctgtcaactcaaccttctgagacgcttgcaagttcagacagttttgcttctactcaacctactcattcatggaaagtaggagacaagtgtatggcagtctggagtgaagatggacagtgttatgaagcggagattgaggagatagatgaagaaaatggcaccgctgcaatcacctttgctggttatggcaatgctgaagtgactccactgttgaacctcaagcctgtagaagaaggaaggaaggcaaaggaggacagtggcaacaaacccatgtcaaaaaaagaaatgattgcccagcagcgtgaatataaaaagaagaaagctttgaaaaaagctcagagaataaaagaacttgagcaggaaagagaggaccagaaagtgaaatggcaacaattcaacaacagagcctattctaaaaacaaaaaaggccaggtaaagaggagtatttttgcttcacctgagagtgtgactggtaaagttggagtaggaacctgtggaattgctgataaacctatgacacaatatcaagatacctctaaatacaatgtcaggcatttgatgcctcaataatcagaaaaactgttggatttcatctctgcagggctttacatttacctttttatccttatatttttctaaaggtaaattatttgttagatgagtaagcaagataccattgtcgtcattggttggcttcagtagaatgaaacgtgaagaaattgcatttgataactgctattcatttaacttttctcattatcagtaccacggttccctcaaagtttgttgaataaagcaacttttgtagatgctgtttcatacagcacttagatgaattattgatcttcctaatatcaggcgcctacttaacctatggtgtgtactttttgtaagttgtaacttgaaattttcagatgctttgaacttgacacatactctagcaattcattggaacaccaaggcaaaaacaccaacctgctaaaagagatcttttcatttttcttattttcagctttaaaacttagctgtcgttcagttaagcttaaagataggttaatttgtaaatggcaaagtttgttttgaggtttttcctcaataacttgtttcccaggcctattaggccatctctaaaattgatctagctgttttatttttatgtactcttagttttatgtaagaaaccttaggatgagctcccttttctaaggtgtttttgttttttgtatgtttgcttttttcctgttttttgttttttccatttacggcagtggtaccatgttttggatgtgtgatgtttatatgggagaacaaaaagctgatgtatagccctgtatacagtgtagatactatttttgtaaaaacacaaggctaaattaatgaacaagaatactgaatatttcatcattaaaaatttcttgtatttcttgtgcattaatctgacgataatttccctgtatattatgttcatttagctgtttgtaatttttgttaattagatcaggttgtctgcatttgttggtgtaagtgaacatcatcacagttatcctgagttgagtttaagccaaatacatgcatagaaaagggtcttcctattaatggaagaaggtaatttttaggatgtgtattatttcagttttgtatgtttaacttttattaaataaagtgtttttaaaatctccaaaaaaaaaaaaaaa

SEQ ID NO: 1600 - DNA, 5375 bp, Homo sapiens
ggggccggtctcgcgcggtctagaagtggagttgctggcggctgcggcggtgacggcggcgacggaggaggcaggcggtggggcgggggcggggactaaggattctgaggtggggagtcgggagtttctggattctttatccggaatttcaagggccgccggagggctgtcgcttctgcagtgcgtaggagcggccggggcgggaggctccgcggagccgaggcgtggagaataagaaagccttgagttttgtgaaaaaccggagaagagaaactaaaaggacagtagaaaaggcttttccagtttgcataatatttccttcatggatactttttcatagcattattatgtgatgtgagaagtttttttttttgaagtaacatggattttatactacagaatcaagagaattggcttataggaaaaattgatttataaaaagtggtacaggttttcatagataaccatgacaacatcccatatgaatgggcatgttacagaggaatcagacagcgaagtaaaaaatgttgatcttgcatcaccagaggaacatcagaagcaccgagagatggctgttgactgccctggagatttgggcaccaggatgatgccaatacgtcgaagtgcacagttggagcgtattcggcaacaacaggaggacatgaggcgtaggagagaggaagaagggaaaaagcaagaacttgaccttaattcttccatgagacttaagaaactagcccaaattcctccaaagaccggaatagataaccctatgtttgatacagaggaaggaattgtcttagaaagtcctcattatgctgtgaaaatattagaaatagaagacttgttttcttcacttaaacatatccaacatactttggtagattctcagagccaggaggatatttcactgcttttacaacttgttcaaaataaggatttccagaatgcatttaagatacacaatgccatcacagtacacatgaacaaggccagtcctccatttcctcttatctccaacgcacaagatcttgctcaagaggtacaaactgttttgaagccagttcatcataaggaaggacaagaactaactgctttgctgaatactccacatattcaggcacttttactggcccacgataaggttgctgagcaggaaatgcagctagagcccattacagatgagagagtttatgaaagtattggccagtatggaggagaaactgtaaaaatagttcgtatagaaaaggctcgtgatattccgttgggtgctacagttcgtaatgaaatggactctgtcatcattagccggatagtaaaagggggtgctgcagagaaaagtggtctgttgcatgaaggagatgaagttctagagattaatggcattgaaattcgggggaaagatgtcaatgaggtttttgacttgttgtctgatatgcatggtactttgacttttgtcctgattcccagtcaacagatcaagccgcctcctgccaaggaaacagtaatccatgtaaaagctcattttgactatgacccctcagatgacccttatgttccatgtcgagagttaggtctgtcttttcaaaaaggtgatatacttcatgtgatcagtcaagaagatccaaactggtggcaggcctacagggaaggggacgaagataatcaacctctagccgggcttgttccagggaaaagctttcagcagcaaagggaagccatgaaacaaaccatagaagaagataaggagccagaaaaatcaggaaaactgtggtgtgcaaagaagaataaaaagaagaggaaaaaggttttatataatgccaataaaaatgatgattatgacaacgaggagatcttaacctatgaggaaatgtcactttatcatcagccagcaaataggaagagacctatcatcttgattggtccacagaactgtggccagaatgaattgcgtcagaggctcatgaacaaagaaaaggaccgctttgcatctgcagttcctcatacaacccggagtaggcgagaccaagaagtagccggtagagattaccactttgtttcgcggcaagcattcgaggcagacatagcagctggaaagttcattgagcatggtgaatttgagaagaatttgtatggaactagcatagattctgtacggcaagtgatcaactctggcaaaatatgtcttttaagtcttcgtacacagtcattgaagactctccggaattcagatttgaaaccatatattatcttcattgcacccccttcacaagaaagacttcgggcattattggccaaagaaggcaagaatccaaagcctgaagagttgagagaaatcattgagaagacaagagagatggagcagaacaatggccactactttgatacggcaattgtgaattccgatcttgataaagcctatcaggaattgcttaggttaattaacaaacttgatactgaacctcagtgggtaccatccacttggctgaggtgaaagaaacatccattctgtggcatgttggacttgatctggcaaaaactgccaataggaggactgcccgacactgcagcaagattgaggataagatggaaggcagcagtataagctgtagatctgttcttagatctcttgaattagtgagacgacagttcccttaggcagtttgtgcatggcatcctttattctctatacatggctttagcggttcttgcctcattttgggattctaaatggaagctttcaacagagcattccattttgtcctgttaaaaccttttgttttcacctaaaccctttctgcttagttgtatctctgtgaaaaacttgtatacacaagcgtccatgtctcacacaaatattgatgtgattattcttaagtgttaaatcattaacacttaaatgacttcattgggaatattgagcagagggactgtgcttctatgcactgggcaaggcagtatttgcttaggaaactaatttagtcatcagagatactttcctaaaaaggaaaaataaaaaacaaaatggtgccactttgggttgaagctactttgttaggcttgaattcatttatatgtcttttgattcttaaaaaaacaaaaaacattccattagaagcaccagtttttttgctcagactttgtggatcagactctacactcaacacactctaatctacttaaaggtatacaaaatatgctgatcttttttaaattatgatttcctgaatttttttcttaagtcgtctcaactgatttactcacttagcttcccttccctcatcagcatagtataatagaatgtatgttacatttttatgaatggcaggtgttcattataatctgtattgacttaaaaagtttcttcctcatgatgctaatagttttttgtatacatgggaggatagcacatttgacagtttttgcatttttatgtatgagcacagtatcctatgactgtgctacgtatatataggtaataaactggaattctgttgatgaatatagctgctgtactgtatattaatatttaatagatcaacaaatggtcattgaaaacacttgtttagcattagaataaaattatatatgtccttgggaaatattatgacagttgactttaagatcaaaaggaagggaagacctgaaagtcatttgaacattttaggaaaagaatattggagagaaaaaggtattaaatatatagaaataggtttttaacctaacaaggtctgcctcttatgacgagaatgcaacagcttggtaaatcataaaagaaacatttaagctaataggattttcgtactgtctctatagctgtagctttaaaattcaacgtatataattggcatggaaacttaatttgcagtcttttcaagcctttaggatagtgtgatgtgtaacaaacaacctcaaatgtgaatgccttgattttatttttatggtgactttagctacagcatttcctatacccagagctaaacactggaataatactgacatcatttaatttaacataagcaattatgtttaaggagtaatttgtgtcatgtacatatttgattgattttttttcttctacataattttatttgaacaaatgtagacagtttatatgtcgcctttttctgttcaaatttgcatggcctattaagttggctggagagtgttttatgtggaaatattttcaagataatgttccttaggaagaaaataacattcttgggttgagggaaggaatgccatacactactgtctcttcagatctgaaatactccagtttagagccaggaaatttcacaggtcacaccgatttttagcattaaaaactaaggaatatacttagcacttacttaatcttttcagttttccagtttacgtctcaggaatgaagtgtagtctatggttgacaatggagttttgtgatcctgcttattgtaactgacaactgttttcaactccaagagctaaactattggcagttcatgttaagttagagtgagggtgtaggtagtgtcagtgagtggctcttgtgcctgctgtagacattaggcctgcactagggccatgtgctgtcaagattcaggaacatggctttaacaagcagatcttgtatcaaggcagaggtgatgccatgccatacttttaggaagtctgagatgataaatatttcaaggtcagtgaagtctatcaatcattctccccttcctcatcagcaatggtagatagaaatgtcctaaacttttctaaatcctagtgatgaggatgtgctgatattcaacatagtccttaaagtgaaaactgagttgttgctgacctccacaaaagaatatggaaaaaagccttgctgtacacctagttgtacagccactctggccaattccatttcctgtccctctgtggttctgactggagaccccagtgtgggggaggtcttaccatttaatatagaaatgatatcaataactaatgctatgtacttggaaaatccaaataaggaagttttaggttggtgcataactttgtttctcaaattttcgttgtcagaacaaatggaaggagaatattatttagactaatccagatttgctttctatgaaaatctaatgtctggattatcttccttttctcatggcctaagaaataaggatcaataaggaatgatttgaatgtaattttgtgaatgtgtggaaaatataaagcagggatttagccttaataaaggtaaccttctgacatctgttgttaatccccctttgtactcttttcctgtatctgcactgttattttgagatgtcatactgtacactgtattgtaaaaataaaaagtaaaattatatttcaaattttaaaagccaaaaaaaaaaaaaaaaaaa

SEQ ID NO: 1601 - DNA, 5605 bp, Homo sapiens; identical to SEQ ID NO: 207

SEQ ID NO: 1602 - DNA, 5862 bp, Homo sapiens
gcgtccgagggagcgcgcgacgggccacgcacgtccgggcgtccagttcggggcagcttctccggctggtgggtgggtggggcagcctttcaggcagggtggcaaccaactatatctgaggaccagagccattttggggcaccagagcttgtgacctctccatctccacccagctgggtccaggggccactctcagcactcacctcagcagctgacatcataaagcagacttgggaacctggaagcactctggagaacctttccctgagacatggagctttggggccgaatgctgtgggccctcctgtctggcccagggaggaggggaagtacccggggctgggccttcagctcatggcaaccccaaccacctctggctgggttatccagtgccatagaactggtcagccactggactggggtctttgagaagaggggtatccctgaggcccgggaatccagtgagtacatcgtggctcatgtccttggagccaaaacatttcagagcctgaggccggcactttggacccagcccttgacctctcagcaactacagtgtatccgggagctgagtagccgtcgattgcagaggatgccggtgcagtacatccttggagagtgggacttccaggggctcagcctaaggatggtgcccccagtgtttattcctcggccagaaacagaggaactggttgagtgggtgctggaagaggtggcccagaggtcccatgctgtgggatccccaggcagccccctcattctggaggtgggctgcggatcaggagccatctccctcagcctgctgagccagctcccccagagccgagtcattgctgtggataagcgggaagctgctatctctctgacccatgagaatgctcagaggcttcggttgcaggacaggatttggatcatccacctcgacatgacctcagaaaggagctggacacacctgccctggggccccatggacctgattgtcagcaaccctccctacgtcttccaccaggacatggagcagctggcccctgagatccgcagctatgaagaccccgcggccctggatggtggggaggagggcatggacatcattacccacattctggccttggcaccccggctcctgaaagactctggtagtatcttcttagaagtggacccaaggcacccggagcttgtcagcagctggcttcagagccggcctgacctgtaccttaatcttgtggctgtgcgcagggacttctgtgggaggccccggttcctgcatatccggaggtctgggccatagcatggctgccctgtggatgccttgtcagtgccgccagcctgaccagaggggaggtggatggcactttccagagcccaggttcttatggcatttcccagggttctgtgatttccccatgctctgcatttctaggatatttctaggacacctggattggctccatcacatcagagtggctgagggcagttgctctgtgttggtgaaattgctgtgggggtatcgggggatatggccagtaaagtattgagagactaacaaatggtgacctaatgttttgtccatgacttgcaggtcccctgacccccttactcccaggtagcactggggcaagggtttccttctgccccagcagggctggccgtcagtcccctgcttggtagtggtgtgggggtgcagtgtggaggaaggcacgtgagtcctcactcctggccttggataccatgggtcctggcatagagcagctcactcccagggattgattagtcctccactgccctgggtgcatgcgtacacaattccctggccaagcctggctcgagcacaggaagctcatctgcgttttggctcaaggatgactgcctgctttctggaggggagggtctggaggtctttgctgcacagttcctgggtcgcacatccacgttcatttaactgaaggcttgagccagtgaggggtgtttcctttttatccccatagcttttagctaaaacatccctcccgagttgaccccctggggtttcaaataacccatgtgtccctggttggggctggggagagtgagaagctgagatactgggcacagggttgtggcctccaccccagctctggtctgtgcagactcatggccaccaggaggcctgcagatccagccttcctgtcaacagcgacaggaaatctctaggttggtgagtgctggtgatgtgagcctacatcagggtgggtcctaagaaacatggcaaaccaggctgtctcattccactagactgccccctgccaccctggcacttcccagggcctggcagtatggtctgatgggcagtatggtccaataggcagcatcctctgctgcagctgggagagctgagttccagggctgtgtcctgcagtgggaccttgggcaactcctttccctatgagaagctggctcttctgagtccagggccaacgccaactggcaacctctttactcttagtcaagtggaatgtgcatgctggcatctgaatgtccattcgccaggcatggagagcaagagaaggtatgtactgcctgaggtcacatgacagtgaccaagtggagacagtaagttagatccctccctttggggagcctatattgctggagtcatacccagcctaagtgttgccctgcactatggctggaggacacatttggtagaggtcacactgcagctcccagtgccccagtgtcctgccctgtgcccagccccagctgcatggactctgagctgcccctggcttcctttaaggaggctgctccagaaggaacctgggtggggagggcgaagggggtgcacaaccagggcaaggctccccacttccttagtcccccatgctcacagacctttgcctgctaaggtcctcaccagtattgccctttctgtctttctccttgtgccctttggctcttgctgtcttcagcagcatctcagggtagctgccctgacctcggagcagtctgtcgcccccctacacctcagccagtcctggcttccctgatggtctctccctcctggcctcaggcccattcctgaggaagggccttggcgagcttgtggatgttgcaccagaagagagtgcagtgttggagagtgacactgtcggggcagctggggccacaagcaggagccggcctcgggcacaactttctgcccagaaaaatgtgcagcttgactctgctgaggaaaaggtccaagccaagaggactggcaggcggggcctcaagcctgcagccactggcttgattgggccctggacgttgagcccagatgttggagccacaccagcctggatttcaatcccagaatctgcccctcaccaggatgtgaccttgggcagatgacttcacctcactcagccttggcttctaaggctgagaaatgggacttaatgctttattttataggatgcatgtgaggagcccatggaatgtgcctggcttggcacattgtggcatttttccttgccttcctcggagggcagacacagggaggaaggacccagtgccctcaggcgtccatctgatgcatgggaccaacataaggcaggcagggatacaaggcagtctggaaagaagggaaggcaggagtttcagtcttgggctcttgactcctcactgttgtctagagatggagccagcaggctggtagcctggcagcctacatctcccctcagcctctcctcactatggccccagtgccttgaggcccaggccagggcagccagtggctctagctcagggaaagccaggcccacctgccctatcccctcccttgctcctgaggccaaagccagagactcgaacagcctccccaccaccaccagcatatgtcaaggagcacttgcaggcagaatgggaggaggacatggagctgatggagtccaggctgtgcaagcccctgaggtcttgagagatgtgcccactgcccgtgcagcctccttcagccagagcccagagcatagacaggagtgtaggagtccctgtttgatgtactctgggagagtaattctatctcctcttctgatagttggggaaactgaggccttgtctcacagttggatgcttttcccagttgtcagtgggtttctccatgggtctcatacagctgccttattgaaataggccccgaaccccctaaatgcaaaaaatactcttttttgctcctttacccccacctggaccctgggctattggctgctcccaatccttgccccaaacacttagctggctccccatgacttaagtgtgttctcttgtgtcctatggaatccagttctgaagaggtgggggaggacaactgtgggaaaagccctgggggcccctcccaaggccccatcagtgctctgagtaggctgtcatcagaacaaagggctccactgctgacaaggtttgagaactgctggcttgaggtgagaacccctttaacctctgcgggacagcatgtctttccctatccaccttcgattcttttctcttttttttcttcattggctccttcttagtggattctcttctctactgccctgggcttcagcctttgtgcagtactctcgatgccctgaacacacaccttccctttgcccaggcggtgcaaacaatccacttcttcaagctccaacacaaatgctgcctcctttaggatgcctgctctgtgctctccctgcctcccctagcccatacctctgctggcaccttctgtaccatgccttcagaaaccttcttatccccctcatctctggggccccctgtggatctggcatacccaagttcagtaaatgtctatcagtaagctgatggtacatgcattttctagaatagagctgggacttcccatgtggcccacatctgacctggcagcccatgtattccggtcattagggatgggaagccatgaggacctggccttctgcccgacccaggcagccattcaagttgagcaatggccacttcgaagactcaagtgcacctgatccctgcgcaacagccacaccaggagaacaggctgtccttggcggcagtaggagcaggcgccaggtttcctggagctcttggcttcagccagcccccagccagagtcctggctaggacagtgacctgatctcctcctcatgaccttctgccctggacaagccccctgaactggatttgggactgtcaaagcaactctacccctgctctggtaggctgaacagtgaccccccaaaatggcagtgtcttaatcacctaaaccttaacatgtgactatattaccttcacatagcaaaatggactttgcagatgtgattaaggatcttgagatggaaggagtatcctggatttttcaggtaaactgagtataatcacaagggcctctgtaaaggaggcaggagtgtcagagtgacggaagaaaatgtatgtaacaatggaagcagaggtcagagtgatgcaattgctggaggaagagccatgagccgaggaatgcagacagcctcttctcctctggggcctcaagaagaatgcagtcctgccaataccttgattttaagccctgtgaaactgatttcagattgctgacctccagaacagtaagatcataaatttgtgttgttttcacatgtgtgaaaacacatgtgtgataatttgttacagcagccacgggaaacgaatatagattgtggtgcccaaattagagtgctgctgtaacacacgcctactgattgaagtggctttggaattgcaacgtggaaatgggcagaggctggaagaattttgagagtcatgataaattgccttaaccacctctcttctgataggtgatgtggccaggggaactcttcctcaaccttcagacctaaa

SEQ ID NO: 1603 - DNA, 1973 bp, Homo sapiens
gggcagctccaccctgggagggactgtggcccaggtactgcccgggtgctactttatgggcagcagctcagttgagttagagtctggaagacctcagaagacctcctgtcctatgaggccctccccatggctttagggggattataaaactaatcatcaaagccaagaaggcaagagcaagcatgtaccgctgaaaacacaagataactgcataagtaatgactttcagtgcagattcatagctaacccataaactgctggggcaaaaatcatcttggaaggctctgaacctcagaaaggattcacaagacgatctgccgaccctctgggagaaaatccagcaagatgcaagccttcagaatctgggatgttaaccagaagaccttctatctgaggaacaaccaactagttgctggatacttgcaaggaccaaatgtcaatttagaagaaaagatagatgtggtacccattgagcctcatgctctgttcttgggaatccatggagggaagatgtgcctgtcctgtgtcaagtctggtgatgagaccagactccagctggaggcagttaacatcactgacctgagcgagaacagaaagcaggacaagcgcttcgccttcatccgctcagacagcggccccaccaccagttttgagtctgccgcctgccccggttggttcctctgcacagcgatggaagctgaccagcccgtcagcctcaccaatatgcctgacgaaggcgtcatggtcaccaaattctacttccaggaggacgagtagtactgcccaggcctgcctgttcccattcttgcatggcaaggactgcagggactgccagtccccctgccccagggctcccggctatgggggcactgaggaccagccattgaggggtggaccctcagaaggcgtcacaagaacctggtcacaggactctgcctcctcttcaactgaccagcctccatgctgcctccagaatggtctttctaatgtgtgaatcagagcacagcagcccctgcacaaagcccttccatgtcgcctctgcattcaggatcaaaccccgaccacctgcccaacctgctctcctcttgccactgcctcttcctccctcattccaccttcccatgccctggatccatcaggccacttgatgacccccaaccaagtggctcccacaccctgttttacaaaaaagaaaagaccagtccatgagggaggtttttaagggtttgtggaaaatgaaaattaggatttcatgatttttttttttcagtccccgtgaaggagagcccttcatttggagattatgttctttcggggagaggctgaggacttaaaatattcctgcatttgtgaaatgatggtgaaagtaagtggtagcttttcccttctttttcttctttttttgtgatgtcccaacttgtaaaaattaaaagttatggtactatgttagccccataattttttttttccttttaaaacacttccataatctggactcctctgtccaggcactgctgcccagcctccaagctccatctccactccagattttttacagctgcctgcagtactttacctcctatcagaagtttctcagctcccaaggctctgagcaaatgtggctcctgggggttctttcttcctctgctgaaggaataaattgctccttgacattgtagagcttctggcacttggagacttgtatgaaagatggctgtgcctctgcctgtctcccccaccgggctgggagctctgcagagcaggaaacatgactcgtatatgtctcaggtccctgcagggccaagcacctagcctcgctcttggcaggtactcagcgaatgaatgctgtatatgttgggtgcaaagttccctacttcctgtgacttcagctctgttttacaataaaatcttgaaaatgcctaaaaaaaaaaaaaaaaaaaaaaaaaaaaaaaaaaaaaaaaaaaaaaaaaaaa

SEQ ID NO: 1604 - DNA, 3797 bp, Homo sapiens
gtgtctgagcctgtggagcgattaaaccgtgcgcggagctgcttctttggcggcagcggcggcggcggtggccggtgcggacgcgcggagctcgccggagacgccgggtggccggagccgtggagcggcggcggagcgggcgccgcggggggtgtggcgcggagaatgattacggacctgaagccaaagaacaagatgcgctagtggacagattgctgaccaggggcttgagagctgggttctattttccctcctcaaactgactttgcagccacggagaggcaggggaaatggaaggtgatgcagtcgaagccattgtggaggagtccgaaacttttattaaaggaaaggagagaaagacttaccagagacgccgggaagggggccaggaagaagatgcctgccacttaccccagaaccagacggatgggggtgaggtggtccaggatgtcaacagcagtgtacagatggtgatgatggaacagctggaccccacccttcttcagatgaagactgaagtaatggagggcacagtggctccagaagcagaggctgctgtggacgatacccagattataactttacaggttgtaaatatggaggaacagcccataaacataggagaacttcagcttgttcaagtacctgttcctgtgactgtacctgttgctaccacttcagtagaagaacttcagggggcttatgaaaatgaagtgtctaaagagggccttgcggaaagtgaacccatgatatgccacaccctacctttgcctgaagggtttcaggtggttaaagtgggggccaatggagaggtggagacactagaacaaggggaacttccaccccaggaagatcctagttggcaaaaagacccagactatcagccaccagccaaaaaaacaaagaaaaccaaaaagagcaaactgcgttatacagaggagggcaaagatgtagatgtgtctgtctacgattttgaggaagaacagcaggagggtctgctatcagaggttaatgcagagaaagtggttggtaatatgaagcctccaaagccaacaaaaattaaaaagaaaggtgtaaagaagacattccagtgtgagctttgcagttacacgtgtccacggcgttcaaatttggatcgtcacatgaaaagccacactgatgagagaccacacaagtgccatctctgtggcagggcattcagaacagtcaccctcctgaggaatcaccttaacacacacacaggtactcgtcctcacaagtgcccagactgcgacatggcctttgtgaccagtggagaattggttcggcatcgtcgttacaaacacacccacgagaagccattcaagtgttccatgtgcgattacgccagtgtagaagtcagcaaattaaaacgtcacattcgctctcatactggagagcgtccgtttcagtgcagtttgtgcagttatgccagcagggacacatacaagctgaaaaggcacatgagaacccattcaggggaaaagccttatgaatgttatatttgtcatgctcggtttacccaaagtggtaccatgaagatgcacattttacagaagcacacagaaaatgtggccaaatttcactgtccccactgtgacacagtcatagcccgaaaaagtgatttgggtgtccacttgcgaaagcagcattcctatattgagcaaggcaagaaatgccgttactgtgatgctgtgtttcatgagcgctatgccctcatccagcatcagaagtcacacaagaatgagaagcgctttaagtgtgaccagtgtgattacgcttgtagacaggagaggcacatgatcatgcacaagcgcacccacaccggggagaagccttacgcctgcagccactgcgataagaccttccgccagaagcagcttctcgacatgcacttcaagcgctatcacgaccccaacttcgtccctgcggcttttgtctgttctaagtgtgggaaaacatttacacgtcggaataccatggcaagacatgctgataattgtgctggcccagatggcgtagagggggaaaatggaggagaaacgaagaagagtaaacgtggaagaaaaagaaagatgcgctctaagaaagaagattcctctgacagtgaaaatgctgaaccagatctggacgacaatgaggatgaggaggagcctgccgtagaaattgaacctgagccagagcctcagcctgtgaccccagccccaccacccgccaagaagcggagaggacgaccccctggcagaaccaaccagcccaaacagaaccagccaacagctatcattcaggttgaagaccagaatacaggtgcaattgagaacattatagttgaagtaaaaaaagagccagatgctgagcccgcagagggagaggaagaggaggcccagccagctgccacagatgcccccaacggagacctcacgcccgagatgatcctcagcatgatggaccggtgatggcggagccttgtgcgtcgccaggacttctctgggctgtgtttaaacggcccgcatcttaatttttctcccttctttctttttttggctttgggaaaagcatcattttaccaaacataccgagaacgaaaacttcaaggatgatgttagaaaaaaatgtgatttaactagaacttgctgtctgatgttagcaaatcatggaatgttctgagtccctgagggtttactgtgaagtgctgaggacagtgttgacaactaactcgttttcctagatggaaacggagacattgacccctccctccatgtggtaaaccactccagaatggccaccaggcttcccagagttctatggtcttcttcccaagagagtttttaattgtaaatgcatacttgggaaggacttagagttttaaactgttttttgcttttgcttttccctgactccctttgcttggagtcagctgcacaccagtagtatggcatgctacgatcaggttctgtcctgaaagctttgcctctttcttggcaaagtttctggtatggtcaagcttgtaaataactttttttacattttaatcttttccattaattaagaggttgaaaagaagtgcagtgtaagaaaacccagcattttaattacttgcaaattaagttaccacagactctgtagtgtgtaaatgttgacaaggaattggatcacaatcatgtagcagaatggcacccagaccactgcccaccagtgacggacatgcacgtggcagatcatgatttccagcccacggagccagcatttgaaccttgtataattaactttcagttatgatttcccatcgacattttctttgccctgtttgtagctgattgttgtgttttataaatcttctgttaaggcagaagggtgattatgagtggttcacagcagcccttataagctgggccagaaaatttcactaggtcagtaatttaaaccttggatcttcaaaaaataaaataatgtgaagcaaaaccaactaaaaagtgattcttgcacatgaactgtcacatgtttaaaaatgtgttttttagagagcctcagtcttactgatttcaaacacttttttcttctgtgtattgcttttaagagagccatcagttagctatcagactctaggttgatgcattttgtacttagctgtactgtgtgatatttttcattattttaggacgccaacatgagacctgtaataaaatatgtaatggggttgaaagctggggaggaggatctactgctgtacagctaataaatcataacggattaacaagtgctccaaagaaaaaaaaaaa

SEQ ID NO: 1605 - DNA, 2986 bp, Homo sapiens
gcgccccagtcgacgctgagctcctctgctactcagagttgcaacctcagcctcgctatggctcccagcagcccccggcccgcgctgcccgcactcctggtcctgctcggggctctgttcccaggacctggcaatgcccagacatctgtgtccccctcaaaagtcatcctgccccggggaggctccgtgctggtgacatgcagcacctcctgtgaccagcccaagttgttgggcatagagaccccgttgcctaaaaaggagttgctcctgcctgggaacaaccggaaggtgtatgaactgagcaatgtgcaagaagatagccaaccaatgtgctattcaaactgccctgatgggcagtcaacagctaaaaccttcctcaccgtgtactggactccagaacgggtggaactggcacccctcccctcttggcagccagtgggcaagaaccttaccctacgctgccaggtggagggtggggcaccccgggccaacctcaccgtggtgctgctccgtggggagaaggagctgaaacgggagccagctgtgggggagcccgctgaggtcacgaccacggtgctggtgaggagagatcaccatggagccaatttctcgtgccgcactgaactggacctgcggccccaagggctggagctgtttgagaacacctcggccccctaccagctccagacctttgtcctgccagcgactcccccacaacttgtcagcccccgggtcctagaggtggacacgcaggggaccgtggtctgttccctggacgggctgttcccagtctcggaggcccaggtccacctggcactgggggaccagaggttgaaccccacagtcacctatggcaacgactccttctcggccaaggcctcagtcagtgtgaccgcagaggacgagggcacccagcggctgacgtgtgcagtaatactggggaaccagagccaggagacactgcagacagtgaccatctacagctttccggcgcccaacgtgattctgacgaagccagaggtctcagaagggaccgaggtgacagtgaagtgtgaggcccaccctagagccaaggtgacgctgaatggggttccagcccagccactgggcccgagggcccagctcctgctgaaggccaccccagaggacaacgggcgcagcttctcctgctctgcaaccctggaggtggccggccagcttatacacaagaaccagacccgggagcttcgtgtcctgtatggcccccgactggacgagagggattgtccgggaaactggacgtggccagaaaattcccagcagactccaatgtgccaggcttgggggaacccattgcccgagctcaagtgtctaaaggatggcactttcccactgcccatcggggaatcagtgactgtcactcgagatcttgagggcacctacctctgtcgggccaggagcactcaaggggaggtcacccgcgaggtgaccgtgaatgtgctctccccccggtatgagattgtcatcatcactgtggtagcagccgcagtcataatgggcactgcaggcctcagcacgtacctctataaccgccagcggaagatcaagaaatacagactacaacaggcccaaaaagggacccccatgaaaccgaacacacaagccacgcctccctgaacctatcccgggacagggcctcttcctcggccttcccatattggtggcagtggtgccacactgaacagagtggaagacatatgccatgcagctacacctaccggccctgggacgccggaggacagggcattgtcctcagtcagatacaacagcatttggggccatggtacctgcacacctaaaacactaggccacgcatctgatctgtagtcacatgactaagccaagaggaaggagcaagactcaagacatgattgatggatgttaaagtctagcctgatgagaggggaagtggtgggggagacatagccccaccatgaggacatacaactgggaaatactgaaacttgctgcctattgggtatgctgaggcccacagacttacagaagaagtggccctccatagacatgtgtagcatcaaaacacaaaggcccacacttcctgacggatgccagcttgggcactgctgtctactgaccccaacccttgatgatatgtatttattcatttgttattttaccagctatttattgagtgtcttttatgtaggctaaatgaacataggtctctggcctcacggagctcccagtccatgtcacattcaaggtcaccaggtacagttgtacaggttgtacactgcaggagagtgcctggcaaaaagatcaaatggggctgggacttctcattggccaacctgcctttccccagaaggagtgatttttctatcggcacaaaagcactatatggactggtaatggttcacaggttcagagattacccagtgaggccttattcctcccttccccccaaaactgacacctttgttagccacctccccacccacatacatttctgccagtgttcacaatgacactcagcggtcatgtctggacatgagtgcccagggaatatgcccaagctatgccttgtcctcttgtcctgtttgcatttcactgggagcttgcactattgcagctccagtttcctgcagtgatcagggtcctgcaagcagtggggaagggggccaaggtattggaggactccctcccagctttggaagggtcatccgcgtgtgtgtgtgtgtgtatgtgtagacaagctctcgctctgtcacccaggctggagtgcagtggtgcaatcatggttcactgcagtcttgaccttttgggctcaagtgatcctcccacctcagcctcctgagtagctgggaccataggctcacaacaccacacctggcaaatttgattttttttttttttttcagagacggggtctcgcaacattgcccagacttcctttgtgttagttaataaagctttctcaactgcc

SEQ ID NO: 1606 - DNA, 1092 bp, Homo sapiens; identical to SEQ ID NO: 271

SEQ ID NO: 1607 - DNA, 2161 bp, Homo sapiens
atcttttttcatcttctagctgtagctcgggctgcttgtcggcttggcctccccctcccccctttgctctctgcctcgtctttccccaggacttcgctattttgcttttttaaaaaaaggcaagaaagaactaaactcccccctccctctcctccagtcgggctgcacctctgccttgcactttgcacagaggtagagagcgcgcgagggagagagaggaaagaaaaaaaataataaagagagccaagcagaagaggaggcgagaagcatgaagtgttaactcccccgtgccaaggcccgcgccgcccggacagacgcccgccgcgcctccagccccgagcggacgccgcgcgcgccctgcctgcagcccgggccggcgaggcgagcccttccttatgcaaagcgcgcagcggagcggcgagcgggggacgccgcgcaccgggccgggctcctccagcttcgccgccgcagccaccaccgccgccaccgcagctcgcggaggatcttcccgagcctgaagccgccggctcggcgcgcaaggaggcgagcgagcaaggaggggccggggcgagcgagggagcacattggcgtgagcaggggggagggagggcgggcgcggggggcgcgggcagggcgggggggtgtgtgtgtgagcgcgctcggaggtttcgggccagccaccgccgcgcaagctagaagcgccccagcccggcaagctggctcacccgctggccacccagcacagcccgctggcccctctcctgcagcccatctggcggagcggcggcggcggcggcggcggcaggagaatggcatcagaactggcaatgagcaactccgacctgcccaccagtcccctggccatggaatatgttaatgacttcgatctgatgaagtttgaagtgaaaaaggaaccggtggagaccgaccgcatcatcagccagtgcggccgtctcatcgccgggggctcgctgtcctccacccccatgagcacgccgtgcagctcggtgcccccttcccccagcttctcggcgcccagcccgggctcgggcagcgagcagaaggcgcacctggaagactactactggatgaccggctacccgcagcagctgaaccccgaggcgctgggcttcagccccgaggacgcggtcgaggcgctcatcagcaacagccaccagctccagggcggcttcgatggctacgcgcgcggggcgcagcagctggccgcggcggccggggccggtgccggcgcctccttgggcggcagcggcgaggagatgggccccgccgccgccgtggtgtccgccgtgatcgccgcggccgccgcgcagagcggcgcgggcccgcactaccaccaccaccaccaccacgccgccggccaccaccaccacccgacggccggcgcgcccggcgccgcgggcagcgcggccgcctcggccggtggcgctgggggcgcgggcggcggtggcccggccagcgctgggggcggcggcggcggcggcggcggcggaggcggcgggggcgcggcgggggcggggggcgccctgcacccgcaccacgccgccggcggcctgcacttcgacgaccgcttctccgacgagcagctggtgaccatgtctgtgcgcgagctgaaccggcagctgcgcggggtcagcaaggaggaggtgatccggctgaagcagaagaggcggaccctgaaaaaccgcggctatgcccagtcctgccgcttcaagagggtgcagcagagacacgtcctggagtcggagaagaaccagctgctgcagcaagtcgaccacctcaagcaggagatctccaggctggtgcgcgagagggacgcgtacaaggagaaatacgagaagttggtgagcagcggcttccgagaaaacggctcgagcagcgacaacccgtcctctcccgagtttttcataactgagcccactcgcaagttggagccatcagtgggatacgccacattttggaagccccagcatcgtgtacttaccagtgtgttcacaaaatgaaatttgtgtgagagctgtacattaaaaaaaatcatcattattattattatttgcagtcatggagaaccacctacccctgacttctgtttagtctcctttttaaataaaaattactgtgttagagaaaaaaaaaaaaaaaa

SEQ ID NO: 1608 - DNA, 1056 bp, Homo sapiens; identical to SEQ ID NO: 457

SEQ ID NO: 1609 - DNA, 5756 bp, Homo sapiens; identical to SEQ ID NO: 1042

SEQ ID NO: 1610 - DNA, 14735 bp, Homo sapiens
cggcggcagtggcggcaccgcctcctcctcacattcccggggtggcggggttagatgagcggccccagtcccggcgccgggggcgctgttcatgccggttcccgacggctccgtggctgctgcggggctggggctggggctacccgccgcggactcccggggtcactaccagctgctgctgtcaggccgggccctggccgaccgctaccggaggatttataccgctgcgctcaatgacagggaccaggggggcggcagcgctggacacccagcctccaggaataagaaaattttaaataagaagaaattgaaaagaaaacagaagagcaaatcaaaagtgaagacaagaagcaagtctgaaaacttagagaatacagtaatcataccagatatcaaactacatagcaatccttctgctttcaatatttactgtaatgtacgccattgcgttctggaatggcagaaaaaggaaatatcattggcagccgcatctaagaactctgtgcagagtggagaatcagatagtgatgaagaagaggaatccaaagagccccctatcaagcttccaaagattattgaggttggcctttgtgaagtttttgaattgatcaaagagacacgattttctcatccatccctgtgtctcaggagtctccaagccctgctcaacgtgctgcagggccagcagccagaaggcctccagtctgagccacctgaggtcctagagtctctcttccagcttcttttggaaatcaccgttcgaagtactgggatgaatgacagcacaggacagtccttaacagcactttcctgtgcttgcctctttagtctggtggcttcttggggagaaacaggaaggacacttcaggccatctctgctatcctcaccaacaatggaagccatgcttgccaaactattcaggtgccaacaattctaaattcgctacagagaagtgtacaagcagttttggtgggaaaaattcaaattcaggactggtttagtaatggcattaagaaagcagctttaatgcacaagtggccattaaaagaaatatctgttgatgaagatgaccaatgtctacttcagaatgatggattttttctttatctattatgcaaggatggattatataaaataggctctggatacagtggaacagttaggggccatatatacaattctacatcccgtattagaaacagaaaagaaaaaaagtcttggttagggtatgctcagggttatttattatatagagatgtgaataaccacagcatgacagccataaggataagccctgaaacactggagcaagatggtactgtgatgttaccagattgccacactgaaggtcaaaatattttattcactgatggagaatatattaatcagatagctgcttcaagagatgatggctttgttgtcagaatatttgccacaagcactgaacctgttctacagcaagaattgcaacttaaactggctagaaaatgcttacatgcctgtggtatctcactattcgatctggaaaaggacttgcatattataagtacaggatttgatgaggagtcagcaattcttggtgcaggacgagagtttgcgctaatgaaaacagcaaatggaaagatatattacactggcaaataccagagtcttggaatcaaacaaggtggtccttcagcaggaaaatgggttgagctaccaattacaaaatctccaaagatagtacacttctcagttggacacgatggctctcacgcccttttagttgcagaagatgggagcatattctttacaggatctgctagtaaaggagaagatggagaatcaactaagagcagacggcaatccaaaccttataaacctaaaaagataattaagatggaaggaaagattgtggtatatacagcctgcaataatggaagtagttctgttatttctaaagatggagaactctacatgtttggaaaagatgccatttactctgatagttcaagtttggtaactgatttgaagggccattttgtaactcaggtagctatgggcaaagctcacacttgtgttttaatgaagaatggagaggtgtggacatttggtgtaaataataaaggacagtgtggacgagatactggtgccatgaaccaaggtgggaaagggtttggagttgaaaatatggcaacagcaatggatgaagacctggaagaagaactagatgaaaaagatgagaagtctatgatgtgccctccaggcatgcacaaatggaagctggagcagtgcatggtttgcactgtctgtggagactgtacaggttatggagccagctgtgtcagtagtggacggccagacagagtccccggagggatctgtggttgtggttccggagaatctggttgtgctgtgtgtggatgttgcaaggcctgtgcaagagagttagatggtcaagaggcaagacaaagaggaattcttgatgcagtgaaagaaatgatacctttagatcttcttttagctgtcccagtgcccggggttaacattgaagaacaccttcagttacgacaagaagaaaaacggcaacgtgtaatcagaaggcacagattagaggaaggaagaggcccccttgtatttgctggtcctatttttatgaaccatcgagaacaggctctagccagactcagatcccatccagcacagctaaagcataaacgggacaagcacaaagatggaagtggagaaagaggcgaaaaggatgcaagcaaaatcacaacataccctccaggctctgtgcgatttgactgtgagctccgggcagtccaagtcagctgtggatttcaccattcagtggttttaatggaaaatggagatgtctatacatttggttatgggcagcatgggcagctaggacatggagatgtcaactccaggggatgtcccactcttgttcaagcattgccaggccctagcacacaagtcactgcaggcagcaaccatacggcagtacttttaatggatggacaggtcttcacatttggaagtttttctaaaggacaactgggcagaccaattttggatgtgccatattggaatgcaaagccagctcccatgcctaacattggatcaaaatatggaagaaaagctacttggataggtgcaagtggggaccaaacttttttacgaattgatgaagcacttattaattctcatgtacttgctacatcagaaatttttgccagtaaacacataataggcttggtacctgcttctatatcagaacctcctccatttaaatgccttctgataaataaagtggatgggagttgtaaaacttttaatgactcagaacaagaggatctgcaaggatttggtgtgtgtcttgatcctgtatatgatgtaatttggaggtttcgaccaaatactagagagctgtggtgttacaatgcggtggttgctgatgccaggcttccctctgcagcagacatgcagtccagatgtagtatcctaagtcctgaacttgccttaccaacaggatcaagggccctcactacccgatctcatgcagctttgcacattttaggttgtcttgataccttggcagctatgcaggacttaaaaatgggtgttgcaagtacagaggaagagactcaagcagtaatgaaggtttattctaaagaagattatagtgtggtaaacaggtttgaaagtcatggaggaggctggggttattctgcccattcagtagaagctatacgtttcagtgccgacactgatattttacttggtggtcttggtctgtttggaggtagaggagaatatactgctaaaattaagctgtttgaattgggtcctgatggaggagatcatgaaactgatggtgaccttcttgcagagactgatgtattggcttatgactgtgctgctagagaaaaatatgcaatgatgtttgatgagcctgttctcctgcaagctgggtggtggtatgtggcatgggcccgagtgtcaggacccagcagtgactgtggatctcatggacaggcatctattaccacagatgatggggttgttttccagttcaagagttcaaagaaatcaaataatggtacagatgttaatgcgggtcagatacctcagttattatacagacttccaaccagtgatggcagtgcttcaaaaggcaaacagcaaaccagtgaacctgtacacattttaaagaggtcttttgcaagaactgtctcagtggaatgttttgagtcattgttgagtattcttcactggagctggaccaccttagtcttaggagttgaagaacttagaggattaaaaggattccagttcacagctacactcctagatttagagagactgcgctttgtgggtacctgttgtctgaggttattgcgtgtctatacctgtgaaatttacccagtgtcagctacaggaaaagcagttgtagaagaaactagcaaattagcagagtgtattggaaaaaccagaactttgttaagaaaaattttatcagaaggagttgatcactgcatggtgaaattggataatgatcctcaaggatatctcagtcaacccttgagtcttctagaagctgtccttcaggaatgtcataatactttcactgcctgctttcattctttctacccaactcctgccttacagtgggcttgcctttgtgatctgctgaattgtttggatcaggatatccaagaagcaaacttcaagacatcaagtagccgactccttgcagctgttatgtcagctctgtgtcacacgtctgttaagctgacttccatcttcccgattgcgtatgatggagaagtattactacgatcaattgttaaacaagttagtacagagaacgactcaacactagttcatcgttttccccttttggtggcacatatggaaaaactcagccagagtgaagagaatatctcagggatgacaagcttccgtgaagttctggagaaaatgctggtcattgttgtgctaccagtcaggaacagcctgaggagagaaaatgaactcttctcctcccacctcgtctctaacacctgtggattactggccagcattgtcagtgaactgacagcgtcagccctgggatctgaggttgatggacttaattctcttcactctgtaaaagctagtgctaaccgatttacaaaaacaagtcagggcagaagttggaacactgggaacgggtcccctgatgcaatctgtttttcagtagacaaacctggaatagttgtggttggtttctctgtctatggaggaggtggaattcatgaatatgaattagaggtgttggttgatgatagtgaacatgcaggagattcaactcattcccacagatggacatctctggaattagtgaaaggaacgtacacaacggatgactcacccagtgatatagctgagatcagacttgacaaagtggttcctttaaaggaaaatgttaaatatgctgtgcgcttgaggaactatggaagccgtacagccaatggagatggaggaatgaccacagttcagtgccctgatggtgtgacattcacattcagcacgtgcagcttgagcagtaacggcacaaaccaaaccagaggacagatcccacagatactctactataggagtgaatttgatggagatttacaatcccaacttctgagtaaagccaatgaagaagataaaaactgtagcagagcattgtctgttgtaagcactgtcgttcgagcctctaaggacctcctgcacagagctcttgctgtggatgctgatgacattccagaactgctgagttcttccagtctgttttccatgctgctcccccttattatagcctacataggaccagtagctgctgctattcccaaggtggctgtagaagtctttggccttgtccaacaattgcttccgtcagttgccattttgaatcagaagtatgcaccgcctgccttcaaccctaatcagtcgacagatagcaccacaggaaaccagcctgaacagggcctctctgcttgtacaacctccagtcactatgctgtcatagagagtgagcacccgtataaacctgcctgtgtgatgcattacaaggtgacattcccagaatgtgtgaggtggatgacaatcgaatttgaccctcagtgtggtactgcacagtcagaagatgtccttcgtttgttgattcctgtcagaactgttcagaattcaggatatggaccaaaattgacatctgttcatgaaaatcttaattcatggatagaattaaagaaattttcaggatcctctgggtggcctactatggttttggtgttgccaggaaatgaggcccttttttcattggagactgcatcagattatgtgaaagatgacaaagcttctttctatggttttaagtgttttgcaattggatatgaatttagccctggacctgatgagggagtcatccaattggaaaaagaattagccaatcttggtggggtttgtgcagcagctctgatgaagaaggacctagcacttcctattggtaatgaattagaagaagaccttgaaattcttgaggaggctgcattgcaggtgtgcaaaacccattctggaattcttggaaagggtctagctctttctcattcaccaactatattagaagcacttgagggaaatttaccactccaaatccaaagcaatgaacagtcttttctggatgattttattgcctgtgtcccaggatcaagtggtggaaggcttgcaaggtggcttcagccagattcatatgcggatcctcagaaaacatctttgatcctgaataaggatgatattcgttgtggttggcctaccaccataactgttcaaacaaaagaccagtatggggatgtggtacatgttcccaatatgaaggtggaagtgaaagctgtccctgtttctcagaaaaaaatgtctttacaacaagatcaagcaaagaaacctcaaaggattcctggcagtcctgcagtaacagctgcatcttctaatactgacatgacttatggagggctggcatcaccaaagctagatgtttcatatgaaccaatgatagtgaaggaagctcgatatattgccataacaatgatgaaggtttatgaaaattattcatttgaagaactacgttttgcatcaccaactcctaagagacccagtgagaatatgctgatccgtgtcaataatgatgggacttattgtgcaaattggactccaggggctattggactctacactcttcatgttaccattgatggcattgaaatcgatgctggtctggaagtaaaagtaaaagacccaccaaaagggatgataccaccaggaactcagttggtcaaaccaaagtctgaacctcagcctaataaggttcgaaaatttgtggccaaggacagtgcggggcttcgcatccgtagccacccttcccttcagagtgagcagataggcatagtgaaagtcaatggaactatcacttttattgatgagatccataatgatgatggtgtgtggctgaggctgaatgatgagacaataaagaagtatgtccctaacatgaatggttacactgaagcctggtgcctctcttttaatcaacatcttggcaagagtcttctggtccctgttgacgaatctaaaactaatactgatgactttttcaaagacataaactcctgctgcccacaggaagcaacaatgcaagaacaagatatgccattcttgcgaggagggccaggcatgtacaaggtagtgaagacgggaccttcaggtcacaacatcagaagctgccctaaccttagaggtatcccaattggaatgttagttctgggaaacaaagtcaaagcagtgggagaggtaaccaattctgaagggacatgggtgcaactggatcagaacagcatggtagagttctgtgagagtgatgaaggagaggcatggtccttagctagagacagaggcggaaaccagtacctccgacatgaagatgaacaagctcttctggatcagaattctcaaactcctcctccaagccctttctcagtgcaagcttttaataaaggggcaagttgcagtgcccaaggatttgattatggactcggaaatagcaaaggtgatcgaggaaacatctcaacatcttctaaaccagcctctacatcaggaaaatcagagctgtcctctaaacacagcagatcgcttaaacctgatggacgtatgagccggactactgctgatcagaagaagccaaggggcacagaaagtttatctgctagtgaatccctcatcttaaaatctgatgctgcaaagttgaggtcagattcccacagtaggtcattatcccccaaccataacaccttgcagacattgaaatctgatgggaggatgccttctagctccagagctgaatccccaggaccaggttctcggttgtcatctcctaagccaaagactctcccagccaataggtctagcccatcgggtgctagttctccacgctcctcctcaccacatgataaaaatctacctcaaaaaagtactgctcctgttaagacaaagcttgatcctcctcgggaacgttctaaatcagactcttacacacttgatccagataccctccgcaagaagaaaatgcccctcacagaacctttgagaggacggtcaacgtcaccaaaaccaaaatcagtaccaaaggattctacagattcccctggatctgaaaatagagctccctctccccatgtggtacaggaaaacctccacagtgaggtggtcgaagtctgcacctcaagtactttaaaaacaaatagtctaacagacagcacctgcgatgacagcagtgaatttaagagtgtggatgaaggttcaaataaagttcattttagcattggaaaagcaccactgaaagatgaacaggaaatgagagcatctcccaaaataagtcgaaaatgtgctaatagacacaccaggcccaaaaaagaaaaatcgagttttcttttcaaaggagatggatccaagcctttagagccagccaagcaagccatgtctccttctgtggccgaatgtgccagagctgtgtttgcttccttcctctggcatgaaggcatagtacatgatgcaatggcttgttcttctttcctaaagtttcatcctgaactttccaaagaacatgctcctataaggagtagtttaaatagccaacaacctacagaggaaaaagaaaccaagttaaaaaatagacattcattagaaatatcatctgcactgaatatgtttaatattgcaccccatggaccagatatatctaagatgggtagcatcaacaaaaacaaggtattgtctatgcttaaggaaccacctctgcatgaaaaatgtgaggatgggaaaaccgagaccacttttgaaatgtccatgcataacacaatgaagtctaagtctcctcttcccttaactttacaacatttagtggctttttgggaagacatctctttggctactatcaaagctgcttcccagaatatgatttttccaagtcctggttcctgtgcagttcttaaaaagaaagagtgtgagaaagagaataagaagtccaaaaaggaaaaaaagaaaaaagaaaaggcagaagttaggcccaggggtaatttgtttggagagatggcccagctggcagtaggaggaccagagaaagataccatctgtgaactgtgtggggagtcacatccatacccggtgacctatcacatgagacaagctcacccaggttgtggccgatatgctggtggacaaggttacaatagcattgggcatttttgtggaggatgggctggtaactgtggtgatggtggcataggaggaagcacttggtatctggtatgtgatcgctgtagagaaaaatacctccgcgaaaaacaggctgctgcaagggagaaggtcaaacaatctaggagaaaaccaatgcaagtcaagacccctcgtgccttgcccaccatggaagctcaccaggtgattaaagccaatgcactcttcctgctgtccctgagcagtgcagcagaaccgagcattctgtgttaccatcctgcaaagccattccaatctcagttgcccagtgtaaaagaaggcatttctgaggatcttcctgtgaaaatgccttgtctctacctgcagacattagctaggcatcatcatgaaaattttgtgggctatcaagatgacaatctattccaggatgaaatgagatatctacgttcaacatctgtacctgccccgtatatatcagtaactcctgatgcaagtcctaatgtatttgaagagccagagagcaatatgaagtctatgccaccaagtttagaaaccagtcccataactgatactgatcttgcaaagagaactgtcttccaaagatcatactcagttgttgcttccgaatatgataaacaacactccattttacctgcacgagttaaagctattcctagaagaagagttaacagtggagacactgaagttggttcttcccttttgagacatccgtctcctgagctttctcggctaatctcagcccacagctctctttctaaaggagaacgaaatttccagtggccagttttagcttttgttatacaacatcatgatctagaaggtcttgaaatagcaatgaaacaggccctaaggaaatctgcttgtcgagtttttgctatggaggctttcaactggcttctgtgtaatgtcatccaaaccacttctctccatgatattctgtggcattttgtggcatcactgactcctgcaccagtggaaccagaggaagaagaggatgaagaaaataaaacaagcaaagaaaattcagaacaagagaaagatacaagagtatgtgaacatccactctcagacatagtgattgccggggaagctgctcatcctttaccacacacctttcaccgcttgctgcagaccatctcagaccttatgatgtctctccccagcggcagttcattacagcaaatggccctgaggtgctggagtctcaaattcaagcaatctgatcaccagttccttcatcagagcaacgtctttcatcacattaacaatattttgtcaaagtcagatgatggcgatagtgaagagagttttagcatcagtatacagtctggctttgaagctatgagtcaggaattatgcatagtaatgtgcttaaaggacttaaccagcattgttgacataaaaacttcaagccgacctgccatgattggcagtttgacagacggctccacagaaaccttttgggaatcaggagatgaagataaaaacaaaactaagaacatcaccatcaactgtgtaaaaggaatcaatgcccgctatgtgtctgttcacgtggacaattcccgagatcttgggaataaagttacctcaatgaccttcttaactggcaaagcagtagaagatttgtgcagaataaagcaggttgatctggattccaggcacattggctgggtaacaagtgaacttccaggaggggataatcacatcataaaaattgaattaaaaggcccagaaaatacactgagagttcgacaagtcaaagtcctgggctggaaagatggtgaaagcacaaaaatagctggccagatttcagccagtgtggcccagcagaggaactgtgaagctgagactctgcgagtattcagactgattacgtctcaagtatttggaaagctcatctctggagatgctgaacctacaccagaacaagaggaaaaagcactattgtcatcacctgaaggagaagaaaaagtatacaatgcaacatcagatgctgacctgaaagaacatatggttggaatcatattcagcaggagtaagctgactaacttacaaaaacaggtgtgtgctcatattgtccaagctattcgcatggaagctaccagagtccgtgaagaatgggaacatgctatatcaagcaaagaaaatgccaattctcagccaaatgatgaagatgcctcctctgatgcctactgctttgagctgctctctatggttttagcactgagtggctctaacgttggccggcaatatctggctcaacagctaaccctgcttcaggatctcttctcgctgcttcacacagcctctcctagagtccagagacaggtaacctctttactaagaagagttttgcctgaagtaacccctagtcgtctggccagcatcataggagtgaaatccctccccccagcagatatcagtgatatcattcactcaacagagaaaggagactggaataagctgggtatcttggacatgtttctaggatgcattgccaaagcactcactgtacagctaaaagccaaaggaaccaccatcactggaacagctggtaccactgtgggcaaaggagttacaacagttactcttccgatgattttcaattccagttatctccgacgaggtgaaagtcattggtggatgaagggctcaacccctacccagatctcagagatcatcattaaacttatcaaggatatggcagcaggtcatctgtcagaagcttggtcccgagtgacaaaaaatgctattgcagaaaccatcattgccttgaccaagatggaagaagaatttaggtctccagtgagatgtattgcaacaactagactctggcttgctctcgcatccctatgtgttcttgatcaggaccacgtagatcgtctctcctcggggagatggatgggaaaggatggacaacaaaaacaaatgcctatgtgtgataaccatgatgatggtgaaactgcagcaatcattttatgcaatgtctgtggaaatttatgtacagactgtgacagattccttcaccttcatcgaagaaccaaaactcatcaaagacaggtcttcaaagaagaagaagaagctataaaggttgaccttcatgaaggttgtggtagaaccaaattgttctggttgatggcactggcagattctaaaacaatgaaggcaatggtggaattccgagaacacacaggcaaacccaccacgagtagctcagaagcatgtcgcttctgtggttccaggagtggaacagagttatctgctgttggcagtgtttgttctgatgcagattgccaggaatacgctaagatagcctgtagtaagacgcatccttgtggccatccatgcgggggtgttaaaaacgaagagcactgtctgccctgtctacacggctgtgacaaaagtgccacaagcctgaagcaagacgccgatgacatgtgcatgatatgtttcaccgaagcgctctcggcagcaccagccattcagctggattgtagtcacatattccacttacagtgctgtcggcgagtattagaaaatcgatggcttggcccaaggataacatttggatttatatcttgtcccatttgcaagaacaaaattaatcacatagtactaaaagacctacttgatccaataaaagaactctatgaggatgtcagaagaaaagccttaatgagattggaatatgaaggtctgcataagagtgaagctatcacaactcctggtgtgaggttttataatgacccagctggctatgcaatgaatagatatgcatattatgtgtgctacaaatgcagaaaggcatattttggtggtgaagctcgctgcgatgctgaggctggacggggagatgattatgatcccagagagctcatttgtggtgcctgttctgatgtttccagggctcagatgtgtcccaaacatggcacagactttttggaatataaatgtcgctactgctgttcagtggctgtttttttctgttttggaacaacacatttttgtaatgcttgtcatgatgattttcaaagaatgactagcattcctaaggaagaactaccacactgtcctgcaggtcccaaaggcaagcagttagaaggaactgaatgtccactccatgttgttcatccacccactggggaagagtttgctctgggatgtggagtgtgcagaaatgcccacactttttagaacacgcagatcctttgtctacagagagaaaaattgccttcatcccccaagaggatgcggtgaagtttaaactctgctcaggataaggacgggaccatttttacatccatgaaaatgaaccattcacagtgcaagaaggataccaaataccatgtacataattcttgctatgaaaagtttccccattattttggtttatcttcttttgaacaaatgacatcaaacttgtgaggtgtttgcatgtggccattaccgtcattggcctgtgaagcattggacatttatagataattgatataaaagaatcgccatgcccatggactaagaacgatgctggctttcaagcaaaaaagaaaaataatcattgtttattgtatactgcctttttgtaatcctgtacaattgcatcacgggtggggataaaaagaggaatattctggtttatttcctagactgttatttaaaaaaaaaaaaaacattgtgttaggacagcatataaatgtaataagtatcacactgtatataaacatatcaatgtttgtcctgtataagaattactaaattacaaatgcaatttcatttaaacttctaggttaagtttgagcctgaaattttaatgaagtgcaatactgagtgtgcctcattatcttgcagctgtaaacatattggaatgtacatgtcaataaaaccactgtacatttttatacagtgataaagtcta

SEQ ID NO: 1611 - DNA, 1188 bp, Homo sapiens
ggcagctgagtcagtgagcagcgccatgatgaggggcagtccctgccagcaccaacaggggctggaaacccagcgataggagcatcagcatctccgaggggtcctgtggctgtctgtggtctccgaggtgctgtacattctgctgctggtggttggcttcagcctcatgtgtctcgagctcttccactccagcaatgtcatcgacgggctcaagctcaatgccttcgcggctgtcttcacggtgctctcaggcctcctgggaatggtcgcccacatgatgtacacgcaggtgttccaggtcaccgtgagcctcggtcctgaggactggagaccccattcctgggactacgggtggtccttctgcctggcgtggggctcctttacctgctgcatggcagcctctgtcaccacgctcaactcctacaccaagacggtcattgagttccggcacaagcgcaaggtctttgagcagggctaccgggaagagccgaccttcatagaccctgaggccatcaagtacttccgggagaggatggagaagagggacgggagcgaggaggactttcacttagactgccgccacgagagataccctgcccgacaccagccacacatggcggattcctggccccggagctccgcacaggaagcaccagagctgaaccgacagtgctgggtcttggggcactgggtgtgaccaagacctcaacctggcccgcggacctcaggccatcgctggcaccagcccctgctgcaagaccaccagagtggtgcccccagaaccctggcctgtgtgccgtgaactcagtcagcctgcgtgggagatgccaggcctgtcctgcccatcgctgcctgggtcccatggccttggaaatggggccagggcaggcccaagggaatgcacagggctgcacagagtgactttgggacagcagccccggactcttgccatcatcacatgagccctgctgggcacagctgcgatgccaggagacacatggccactggccactgaatggctggcacccacaagccagtcaggtgcccagaggggcagagccctttggggggcagagagtggcttcctgaaggagggggcagtggcgcaggcactgcaggggtgtcacacagcaggcacacagcaggggctcaataaatgcttgttgaacttgaaaaaaaaaaaaaaaa

SEQ ID NO: 1612 - DNA, 1338 bp, Homo sapiens
attgcgcgcgccggaagtacctacctgggataacggcggcgagcggacggctgcatttacggggtctcccggagggccagagtcggaaattgttgaaaacgttaaatttgattcctaaaaggactcaatggcttacagaagagacgaaatgtggtctgagggacgatatgaatatgaaagaattccgagagaacgagcacctcctcgaagtcatcccagtgatgaatctggttatagatggacaagagacgatcattctgcaagcaggcaacctgaatacagggacatgagagatggctttagaagaaaaagtttctactcttcccattatgcgagagagcggtctccttataaaagggacaatacttttttcagagaatcacctgttggccgaaaggattctccacacagcagatctggttccagtgtcagtagcagaagctactctccagaaaggagcaaatcatactctttccatcagtctcaacatagaaagtccgtgcgtcctggtgcctcctacaaacggcagaatgaaggaaatcctgaaagagataaagagaggcctgtccagtctttgaaaacatcaagagatacttcaccctcaagtggttcagcagtttcttcatcaaaggtgttagacaaacccagtaggctaactgaaaaggaacttgctgaggctgcaagcaagtgggctgctgaaaagctagagaaatcagatgaaagtaacttgcctgaaatttctgagtatgaggcgggatccacagcaccattgtttactgaccagccagaggaacctgagtcaaacacaacacatgggatagaattatttgaagatagtcagctaaccactcgctctaaagcaatagcatcaaaaaccaaagagattgaacaggtgagagtctagttgtcttcatgtacataatttttgtttgtgttgctttgcacatgtaaacatttattgaataaatatgcttcatttctttttccacctgtaactctaaaactacaacttaaaaaattataaaaattgtttgagttgacttcacagtcagtttgatcagtatggtcccccacctggattgtttatttttaaataaaaaacagacttcttttttacagaatattaatattctagttagtatgaagcaattaaaaattattaaagttaatagggatgggatggaagaaatgttcaatgtagcaaaatgttagcaaatgttatttttgaatattgggattacagatgtttcttatgttttttcattatactttaaggtagtttccaaatattaaaggaaaaataaaggatactatttaagtctaaaaaaaaaaaaaaaa

SEQ ID NO: 1613 - DNA, 1394 bp, Homo sapiens; identical to SEQ ID NO: 774

SEQ ID NO: 1614 - DNA, 6103 bp, Homo sapiens
atccggggcagcggggaatggctgagccaggggttcgccgcccccgccgccgccgccgccgccgccgccgccgccgccgcccgctttcggctcgggcctcaggaccgtagcatcctgagacattttgaattgacacttctcaagatttgactggatcagagttcatcatgtcaaagttgaaaagctcagagtcagtcagggtggtggttcgctgtcggcccatgaatggcaaggaaaaggctgcttcgtatgacaaagtggtggatgtggatgttaagctggggcaggtgtctgtgaagaaccccaaagggacggcccatgaaatgcccaagaccttcacctttgatgccgtctatgactggaatgccaagcagtttgaactgtacgatgagacgttccgaccacttgttgactctgtcctgcaaggtttcaatggaaccatttttgcctatggacaaactgggacaggaaaaacctacaccatggaaggaatccgtggtgaccctgaaaaaagaggagtcattcctaactcatttgaccatatcttcacccacatctctcgatcccagaatcaacaatacctggtcagggcttcttacttagagatctaccaggaggagatccgagatttgctctcaaaggatcagaccaaaaggcttgagctcaaagagaggcctgacacaggagtgtatgtgaaagacctgtcttcctttgtcaccaagagtgtgaaggagatagagcatgtgatgaatgtggggaaccagaaccgttctgtcggtgctaccaacatgaacgagcacagctcgcgttctcatgcaattttcgttatcactattgagtgcagcgaggtgggcctcgatggtgaaaaccacatccgtgtaggaaaattgaaccttgtagatcttgctggcagcgaacggcaagccaagaccggcgcacaaggggagagattaaaagaagctaccaagatcaacctctccctttccgctttgggtaatgtcatctctgctctagtggacggcaaaagcactcacattccatatcgggactcaaagcttaccaggctcctccaagattcccttggtggcaatgccaagactgtgatggtggccaacgtggggcctgcctcttacaacgtagaagagactctgaccactctgcgatatgccaaccgtgccaaaaacattaagaacaaaccaagggtcaatgaggaccccaaggatgccctccttcgagaattccaggaagagattgctcggctcaaggcccagctggaaaaacggtccattggtaggaggaagaggcgagagaagcggagggaaggtggtggcagtggtgggggtggggaagaggaggaggaggagggagaagagggtgaggaggaaggggatgataaggatgattactggcgggaacagcaagaaaaactggagattgagaagcgggccattgtagaggatcacagcttggttgcagaggagaagatgaggctgctgaaggagaaagagaaaaagatggaggacctgcggcgggagaaggatgctgccgagatgctgggcgccaagatcaaggccatggagagtaagttgcttgttggaggaaaaaatatagtagatcatacgaatgaacagcagaaaatcctggagcagaaacgacaggaaattgcagagcagaaacgtcgagaaagagaaatccagcaacagatggaaagtcgagatgaggagaccttggaacttaaagagacatacagctcattgcagcaagaggtggacatcaagaccaaaaaactcaaaaagctcttctccaagcttcaggcagtgaaggctgagatccatgacctccaagaagaacacatcaaggagcgccaagagctagagcagactcagaatgagctcaccagggagctgaaactcaagcatcttattatagaaaactttatccctctggaagaaaaaagtaaaattatgaatagagccttctttgatgaagaggaagatcattggaaactacatcctataaccagactggagaaccagcagatgatgaagcggccagtctcagccgtgggatataagagaccattgagccagcacgcaagaatgtccatgatgattcgtccagaggcccgatatagggcagaaaacattgtgctgttagagctggacatgcccagccggaccaccagagactatgagggtccagccattgcccccaaggtccaggctgcattggatgcggctctgcaggatgaagatgagatacaggtggatgcatcatcatttgaaagcactgcaaataagaaatccaaggccaggcctaaaagtggaaggaagtcgggatcctcctcctcttcctcaggaacccctgcatctcagctttatccacagtctcgggggctggttccaaagtaaagccagcttctcctctcccagggcggaaacagcatttgccttctgagagaagagactagcaaaaagctgcagagaggattcggcccaaactcagaactgttcccctgaggagaagcggtggcctctttgcagatcaaccaacttaatctggttgaacgtgctgttcctaatctggcactcagcccctctgggaaacatcttttaattagcatctcagaaatgcatgggtaaggtaaagtgcgatagttcaagtggaaagcaagagaatgaccagtgaccttgcttccttcccccttgccttcttctcccccttcccctgtgctccctttctctcctctctccttttctagcctgttctttacatggggctcccttcttgttgaacaatagggcagaatcaggagtcaccttagcaggaccacatctttggagcctcgggataaaatgacagtgaggttgaaaagtgaaaaccctagaacttgaataggtgcctgttcttgtagggagaaatgagaaatcgcatttggatccaggccccaggtgggcaccatcagcagtcttgcttccatgcacctcagtaagaagtggatctgcctttgggacctgctcagtgaggaaatctcttccaatttctgcttctgaatgattcaatgttgggagcaatagaaataacattccctttgccttctctgagtgtttagggaaatagcttctttaaaacctcaaaaccatgaccatcctgtcaaagacctaagtctgtaagctggtgccatgtccatacaccatgtcactttactcttcatttgtcaccatcttttcccatgcacgcatactctgaacatccttgtgtgggcccatcctctgcatccagagcatgctctgcagtgggcctgttttgtggaagaaaggaggctgtctctgccttctctgatgggactggagttgagggaaggagctgtattgtggcacttctgaattccccgttttgttccatattggtatagagagcagaagagtagctaggcagatgcagagatggagacatgagactcagtgcagtgggcagggaagacataacagatggaagcaaaggaatcctgcctgccttcagcagagaattcaccgaatcctagaactgtggctccctccaggcagagcctaagatgctggtgaagaatagctgtgtgattgaataggctcaaaggagagttcagaattcccatttacatattactagtttggtttgtaagttttagttccttgtattattgagattcagagcttcattttatgttggtcattaggtgaatattactcattttccctcaagagaagctcataagtgtgtgtgggtgtgagagcacgatggtgcctgtgttctgtgaatgtgtccatatgtgtctgtaagagagacagagaccaagaacttgcccaattttagaaatacactaatgtgcagttgttgccttttgtctgtattgaaggcccattgaatgactaatccaggctggaagcattcccatgtgggtgtctgagtccatgagccaagcctgaggggacagtgagtctccaggtctgccacactggtgcaccttgctggcacggtgcctcaggaaggtggcgactcaggtgggccttgagttatattttaactcagctgctcagttcccagggcacatttctggatcagaacccatgggaaacaggaggtactaagtgcaatgtcttagcattctgcaaaatggagatctgttgtccagcggcttatctcctttttagtaacccttctttctgaacccagggcccttttcagccttccctcatattttcttgagatcaaactttacttctttcttatttactaagaatttgcctgtttgaataagaacaaaacgctaaggtgggtagcctaagctgattttctgctggttacacgtgtctctcacaccacatttcctcaaagctaatctgaattctgtaggctaaaaatattcatgtagcaaatctgagaattgaaaactgcagataaccggccgggtatggtgactcatgcctgtaatcctagcactttgggaggccgaggtgggtggaccacctgaggttaggacttcaagaccagcctggccaacatggtgaaaccccatctgtactaaaaatacaaaaatttgcctggtgtggtggtgcatgcctctagtcctagctactcgggaggctgaggcacgagaatcacttgaacctgggaggcggaggttgcagtgagtcgagataacactactgcattccagcctgggtgacagagtgagactccacctcaaaaaaaaaaaaaaaaaaaaaaaaaacagaaagaaagaaaaagaaaactgcagataaccctatacattaatactggtatctcgaggtgactcttctgaccaagggtggttaagtgacacatagaacttttctaagagaagacagacaagttgacaggcatgccttgtactcagctgtgttcatgtggtggtctgtggaaagaaaagaagactcatttggaaatgaagctgtccctttccaagcagtctctggtgcttttcttctctcaaaatggatccgataaatatttgaatagagcagattgtagaatgtcgtgctgtcaccagaaagctgctgttttgggttctgcattgagccaaatatgtagaggacctaccaagcccactgagggactaggttttcatgtctctagtcatacctagaatgttctgagccgtctgagggccttcatgccggcagcagctagcaaagccagaaagcaagtctaacaggatctaagatgaccatcaggagaaggagtttgagactgtgtatgcaacccccaatagacccccttttactctgatctggagaatgtatctggcttcatattttcaagtcacatgtctctcagacccctggattcagaacccaaggccacaaatcataggcatgaagcactttcttaagactgacctaacgctggattatttcccgtccaatgcctgcatgctgcttgaattgctccacccacacctccatgaccaagggcgccagagtgctgcaactggggcgtgggccgctctctgcttttcctgtctgactctgacaagtcctccctcactgaatgtagaatcgttgccaagtttctgagaagtgtcgattccctgttaacatggatatcagttctgcctcacatttcccacttgaggttgaggcgtactggagacaacacctcagaccatctgaaccccatcagtggacgaaaatggggctgttaatatactctaaaagccatactaaaaatgctctgagggaactggctaagaatagtgggcctggtgattgtctatcacgcaaggctttgttttgtactgttcagaaatctgtcacctttctgcctgcccttgtttcctgaatgaaatgcttctggggttatttatgaaaggagtgatcctggggcaggcaggaggcagtgggcttcatggctccttgaagttattactgatcttgaccttctctttggctacctttagacaaagaatacgccaatcaatacttggggctctaagttttacaattgatatttatttgtatcatctctttgtctaggaatgtaaaagtgattctaaactaagatgtgtaataaaaatcaatcagatttattgtacctacaaaaa

SEQ ID NO: 1615 - DNA, 2814 bp, Homo sapiens
ctcactttaccactactcgctatagagccctggtcaagttctctccacctctctatctatgtctcagtttcttcatctgtaacatcaaatgaataataataccaatctcctagacttcataagaggattaacaaagacaaaatatgggaaaaacataacatggcgtcccataattattagatcttattattgacactaaaatggcattaaaattaccaaaaggaagacagcatctgtttcctctttggtcctgagctggttaaaaggaacactggttgcctgaacagtcacacttgcaaccatgatgcctaaacattgctttctaggcttcctcatcagtttcttccttactggtgtagcaggaactcagtcaacgcatgagtctctgaagcctcagagggtacaatttcagtcccgaaattttcacaacattttgcaatggcagcctgggagggcacttactggcaacagcagtgtctattttgtgcagtacaaaatatatggacagagacaatggaaaaataaagaagactgttggggtactcaagaactctcttgtgaccttaccagtgaaacctcagacatacaggaaccttattacgggagggtgagggcggcctcggctgggagctactcagaatggagcatgacgccgcggttcactccctggtgggaaacaaaaatagatcctccagtcatgaatataacccaagtcaatggctctttgttggtaattctccatgctccaaatttaccatatagataccaaaaggaaaaaaatgtatctatagaagattactatgaactactataccgagtttttataattaacaattcactagaaaaggagcaaaaggtttatgaaggggctcacagagcggttgaaattgaagctctaacaccacactccagctactgtgtagtggctgaaatatatcagcccatgttagacagaagaagtcagagaagtgaagagagatgtgtggaaattccatgacttgtggaatttggcattcagcaatgtggaaattctaaagctccctgagaacaggatgactcgtgtttgaaggatcttatttaaaattgtttttgtattttcttaaagcaatattcactgttacaccttggggacttctttgtttatccattcttttatcctttatatttcatttgtaaactatatttgaacgacattccccccgaaaaattgaaatgtaaagatgaggcagagaataaagtgttctatgaaattcagaactttatttctgaatgtaacatccctaataacaaccttcattcttctaatacagcaaaataaaaatttaacaaccaaggaatagtatttaagaaaatgttgaaataatttttttaaaatagcattacagactgaggcggtcctgaagcaatggtttttcactctcttattgagccaattaaattgacattgctttgacaatttaaaacttctataaaggtgaatatttttcatacatttctattttatatgaatatactttttatatatttattattattaaatatttctacttaatgaatcaaaattttgttttaaagtctactttatgtaaataagaacaggttttggggaaaaaaatcttatgatttctggattgatatctgaattaaaactatcaacaacaaggaagtctgctctgtacaattgtccctcatttaaaagatatattaagcttttcttttctgtttgtttttgttttgtttagtttttaatcctgtcttagaagaacttatctttattctcaaaattaaatgtaatttttttagtgacaaagaagaaaggaaacctcattactcaatccttctggccaagagtgtcttgcttgtggcgccttcctcatctctatataggaggatcccatgaatgatggtttattgggaactgctggggtcgaccccatacagagaactcagcttgaagctggaagcacacagtgggtagcaggagaaggaccggtgttggtaggtgcctacagagactatagagctagacaaagccctccaaactggcccctcctgctcactgcctctcctgagtagaaatctggtgacctaaggctcagtgtggtcaacagaaagctgccttcttcacttgaggctaagtcttcatatatgtttaaggttgtctttctagtgaggagatacatatcagagaacatttgtacaattccccatgaaaattgctccaaagttgataacaatatagtcggtgcttctagttatatgcaagtactcagtgataaatggattaaaaaatattcagaaatgtattggggggtggaggagaataagaggcagagcaagagctagagaattggtttccttgcttccctgtatgctcagaaaacattgatttgagcatagacgcagagactgaaaaaaaaatttactttgatctctgtttttgaattcttattatttatattttgcttactaccttttttgccttttgtccttttgtggagagggcgatgaattaagagtagtggggtgggtggcgagtaagtaaaatttcaaatagcattttagtgaatgcaattcagtagtcctgaagcctgacttaataaaacaaaattcatttatggttgtttcatgaaagttattagataggatcaagttttgtttgtatattgtttgccttgctctgtttttgcttttgtgcttaggcaagtgcaaaatactctatggaaatcataattgtcatcttcttcatggtgttagggatatattgtcacatgatttcaataaatcctttttttgctttaaaaaaaaaaaaaa

SEQ ID NO: 1616 - DNA, 2459 bp, Homo sapiens
gcacttccgggtgccattgcaggatgcagaaagcctcagtgttgctcttcctggcctgggtctgcttcctcttctacgctggcattgccctcttcaccagtggcttcctgctcacccgtttggagctcaccaaccatagcagctgccaagagcccccaggccctgggtccctgccatgggggagccaagggaaacctggggcctgctggatggcttcccgattttcgcgggttgtgttggtgctgatagatgctctgcgatttgacttcgcccagccccagcattcacacgtgcctagagagcctcctgtctccctacccttcctgggcaaactaagctccttgcagaggatcctggagattcagccccaccatgcccggctctaccgatctcaggttgaccctcctaccaccaccatgcagcgcctcaaggccctcaccactggctcactgcctacctttattgatgctggtagtaacttcgccagccacgccatagtggaagacaatctcattaagcagctcaccagtgcaggaaggcgtgtagtcttcatgggagatgatacctggaaagaccttttccctggtgctttctccaaagctttcttcttcccatccttcaatgtcagagacctagacacagtggacaatggcatcctggaacacctctaccccaccatggacagtggtgaatgggacgtgctgattgctcacttcctgggtgtggaccactgtggccacaagcatggccctcaccaccctgaaatggccaagaaacttagccagatggaccaggtgatccagggacttgtggagcgtctggagaatgacacactgctggtagtggctggggaccatgggatgaccacaaatggagaccatggaggggacagtgagctggaggtctcagctgctctctttctgtatagccccacagcagtcttccccagcaccccaccagaggagccagaggtgattcctcaagttagccttgtgcccacgctggccctgctgctgggcctgcccatcccatttgggaatatcggggaagtgatggctgagctattctcagggggtgaggactcccagccccactcctctgctttagcccaagcctcagctctccatctcaatgctcagcaggtgtcccgatttcttcatacctactcagctgctactcaggaccttcaagctaaggagcttcatcagctgcagaacctcttctccaaggcctctgctgactaccagtggcttctccagagccccaagggggctgaggcgacactgccgactgtgattgctgagctgcagcagttcctgcggggagctcgggccatgtgcatcgagtcttgggctcgtttctctctgagcttccttctcctacatctgcttgctgctgggatacccgtcaccacccctggtccttttactgtgccatggcaggcagtctcggcttgggccctcatggccacacagaccttctactccacaggccaccagcctgtctttccagccatccattggcatgcagccttcgtgggattcccagagggtcatggctcctgtacttggctgcctgctttgctagtgggagccaacacctttgcctcccacctcctctttgcagtaggttgcccactgctcctgctctggcctttcctgtgtgagagtcaagggctgcggaagagacagcagcccccagggaatgaagctgatgccagagtcagacccgaggaggaagaggagccactgatggagatgcggctccgggatgcgcctcagcacttctatgcagcactgctgcagctgggcctcaagtacctctttatccttggtattcagattctggcctgtgccttggcagcctccatccttcgcaggcatctcatggtctggaaagtgtttgcccctaagttcatatttgaggctgtgggcttcattgtgagcagcgtgggacttctcctgggcatagctttggtgatgagagtggatggtgctgtgagctcctggttcaggcagctatttctggcccagcagaggtagcctagtctgtgattactggcacttggctacagagagtgctggagaacagtgtagcctggcctgtacaggtactggatgatctgcaagacaggctcagccatactcttactatcatgcagccaggggccgctgacatctaggacttcattattctataattcaggaccacagtggagtatgatccctaactcctgatttggatgcatctgagggacaaggggggcggtctccgaagtggaataaaataggccgggcgtggtgacttgcacctataatcccagcactttgggaggcagaggtgggaggattgcttggtcccaggagttcaagaccagcctgtggaacataacaagaccccgtctctactatttaaaaaaaagtgtaataaaatgataatataaaaaaaaaaaaaaaaaa

SEQ ID NO: 1617 - DNA, 4121 bp, Homo sapiens
ctgcgcctcgggggtcggcgtccaggctcggagcgcggcacggagacggcggcagcgctggactaggtggcaggccctgcatcatggaaactctttctaatgcaagtggtacttttgccatacgccttttaaagatactgtgtcaagataacccttcgcacaacgtgttctgttctcctgtgagcatctcctctgccctggccatggttctcctaggggcaaagggaaacaccgcaacccagatggcccaggcactgtctttaaacacagaggaagacattcatcgggctttccagtcgcttctcactgaagtgaacaaggctggcacacagtacctgctgagaacggccaacaggctctttggagagaaaacttgtcagttcctctcaacgtttaaggaatcctgtcttcaattctaccatgctgagctgaaggagctttcctttatcagagctgcagaagagtccaggaaacacatcaacacctgggtctcaaaaaagaccgaaggtaaaattgaagagttgttgccgggtagctcaattgatgcagaaaccaggctggttcttgtcaatgccatctacttcaaaggaaagtggaatgaaccgtttgacgaaacatacacaagggaaatgccctttaaaataaaccaggaggagcaaaggccagtgcagatgatgtatcaggaggccacgtttaagctcgcccacgtgggcgaggtgcgcgcgcagctgctggagctgccctacgccaggaaggagctgagcctgctggtgctgctgcctgacgacggcgtggagctcagcacggtggaaaaaagtctcacttttgagaaactcacagcctggaccaagccagactgtatgaagagtactgaggttgaagttctccttccaaaatttaaactacaagaggattatgacatggaatctgtgcttcggcatttgggaattgttgatgccttccaacagggcaaggctgacttgtcggcaatgtcagcggagagagacctgtgtctgtccaagttcgtgcacaagagttttgtggaggtgaatgaagaaggcaccgaggcagcggcagcgtcgagctgctttgtagttgcagagtgctgcatggaatctggccccaggttctgtgctgaccaccctttccttttcttcatcaggcacaacagagccaacagcattctgttctgtggcaggttctcatcgccataaagggtgcacttaccgtgcactcggccatttccctcttcctgtgtccccagatccccactacagctccaagaggatgggcctagaaagccaagtgcaaagatgagggcagattccttacctgtctgccctcatgatttgccagcatgaattcatgatgctccacactcgcttatgctacttaatcagaatcttgagaaaatagaccataatgattccctgttgtattaaaattgcagtccaaatcccataggatggcaagcaaagttcttctagaattccacatgcaattcactctggcgaccctgtgctttcctgacactgcgaatacattccttaacccgctgcctcagtggtaataaatggtgctagatattgctactattttatagatttcctggtgcttagccttataaaaaaggttgtaaaatgtacatttatattttatcttttttttttttttttttctgagacgcagtctggctctctgtcgcccaggctggagtgcagtggctcgatctctgctcactgcaagctccgcctcccgggttcacgccattctcctgcctcagcctcccgagtagctgggactacaggcgcccgccaccacgcccggctaattttttgtatttttagtagagacggggtttcaccgtgttagccaggatggtgtcgatctcctgacctcgtgatccacccgcctcggcctcccaaagtgctgggattacaggcttgagccaccgcgcccggctatattttatcttttatctttttctttgacatttaccaatcaccaagcatgcaccaaacactgctttaggcactggggacacaaaggggacagagccatcctcctttgacacctggtcttcagttctgtgcccaacgtatatagttttgacaatgaccaggttggactgtttaatgtctttcaacttaccacgtaatcctcttgtagggatcacatctttctttatgatattgtatttctctacctctaacagtaaaaattccattcaacccttaaagctcacttcaaattcttctttgagaagtttttcctttctccgcaaccagatgtacatatttgaactctctttgtacttggagggcacttctttcgtggtagttcttttatttttattaatctctgtatccttagatagtcctccaacaaccaaaggttgggactctgtcttacatatctgggtgcccctcatagtgcagtaataagtaagttgattatatacgagctatgtaacttatattttttaatggttggatatcactgagtttttttttttaagaatttttttattgaggtaaacttcacataacataaaattaactattttaaagtgagaagttcagtgccacttagtattgttaacaatgttgcataaccaccacctttatttaaagttccaaaaaaaatgttctcctctaaaaggaaaccccatcccattaagcagatactctccattccttccttcctccagcccccagcaaccaccaatctgctttctgtctctatggttttatctattcttgctattttatataaatcgaattgtatgagaccttttgtgtctggcttctttcacttagtacaagtttttgagatttatttacatagtagcatgtatcaacacttcatttttatggccaaataaaattgtattatgtgtttatagcacaatttatttatccactcattcattgatggactttgggttgtttctgacttttggctattgggaatagtgctgctatgaatgtttgtgtacctgtatttgtttgaatgcctattttgcattctcttgggtatatatctaggagtggaactgctgggtcatatgttaattctatgtttagctttttgaggaacagacaaactgttttccacagcagttgaaccattccacattcccaccagcaatgtatgagaattccaatttctgtccacttcctcaccaacacttattattttccttttcctttttttaaaaaaaataagttatggccatcttagtgggtgtgaagtggtatctcattgtgttttttatttgcatttcctatgtaatgagctagaaactaaagtacaaactagatgggacatccagtccctttgatagataatgctgagtaaaaaatgagatgaaagacatttgtttgtttttagaacatgagtgacagtttgttaaaaagctttagaggaggaatgaaaacaaagtgaagtacacttagaaaagggccaagtggacatcttggatgtcaagtgcctagttcagtatcttttttttttttttttttttttttgagacagtgcctcactctgtcacccaggctggagtgtagtggcatgatctgggctcactgcaacctcctcctcctggattcaagcaattctcttgcttcagcctcccaagtagctgagactacaagcacccaccaccacacccggctaattttgtatttttcagtagagacggggtttcgccacattggccgtgttggtcttgaactcctggcctcaagcaatccgcctacctcagcctcccaaagtgctaggattacaggcataagccactgagcccagccctagttcagtatcttttatgtaaattataaacatctgcaacattatgtatcatatgcagatacttattgcatttcttttattagtggtgaaagtgttctatgcatttattggctcttgaatttcctcatctatgaattgtcattcacacacctacttttctgcttcgtttttacatatgtctttgcctattaaagatattatccctctgttttatattttctctcattcttgtattgccttttaaattttgttatgatgtttcattaataaacagtgttttgttttcctctataaaaaaaaaaaaaaaa

SEQ ID NO: 1618 - DNA, 2914 bp, Homo sapiens
gatttcagttgaaagatgtgtttttgtgagtagagcaccgcagaagaactgaagactgttgtgtgctccccgcagaaggggctaccatgatcctttcctcctataacaccatccagtcggttttctgttgctgctgttgctgttcagtgcagaagcgacaaatgagaacacagataagcctgagcacagatgaagagcttccagaaaaatacacccagcgtcgcaggccgtggctcagccaattgtcaaataagaagcaatccaacacgggccgtgtgcagccgtcaaaacgaaagccactgcctcccctcccaccctctgaggttgctgaagagaagatccaagtcaaggcactttatgattttctgcccagagaaccctgtaatttagccttaaggagagcagaagaatacctgatactggagaaatacaatcctcactggtggaaggcaagagaccgtttggggaatgaaggcttaatcccaagcaactatgtgactgaaaacaaaataactaatttagaaatatatgagtggtaccatagaaacattaccagaaatcaggcagaacatctattgagacaagagtctaaagaaggtgcatttattgtcagagattcaagacatttaggatcctacacaatttccgtatttatgggagctagaagaagtacggaggctgccataaaacattatcagataaaaaagaatgactcaggacagtggtatgtggctgaaagacacgcctttcaatcaatccctgagttaatctggtatcaccagcacaatgcagccggtctcatgactcgtctccgatatccagttgggctgatgggcagttgtttaccagccacagctgggtttagctacgaaaagtgggagatagatccatctgagttggcttttataaaggagattggaagcggtcagtttggagtggtccatttaggtgaatggcggtcacatatccaggtagctatcaaggccatcaatgaaggctccatgtctgaagaggatttcattgaagaggccaaagtgatgatgaaattatctcattcaaagctagtgcaactttatggagtctgtatacagcggaagcccctttacattgtgacagagttcatggaaaatggctgcctgcttaactatctcagggagaataaaggaaagcttaggaaggaaatgctactgagtgtatgccaggatatatgtgaaggaatggaatatctggagaggaatggctatattcatagggatttggcggcaaggaattgtttggtcagttcaacatgcatagtaaaaatttcagactttggaatgacaaggtacgttttggatgatgagtatgtcagttcttttggagccaagttcccaatcaagtggtcccctcctgaagtttttcttttcaataagtacagcagtaaatctgatgtctggtcatttggagttttaatgtgggaagtttttacagaaggaaaaatgccttttgaaaataagtcaaatttgcaagtcgtggaagctatttctgaaggcttcaggctatatcgccctcacctggcaccaatgtccatatatgaagtcatgtacagctgctggcatgagaaacctgaaggccgccctacatttgccgagctgctgcgggctgtcacagagattgcggaaacctggtgaccggaaacagaatgccaacccaaagagtcatcttgcaaaactgtcatttattgtgaatatcttcaccatatggggtcacttatggtgaatatctttcttcagagttgctgactcttgaaaacagtgcaaagatcacagtttttaaaagttttaaaaatttaagaatattcacacaatcgtttttctatgtgtgagagggatttgcacactcttatttttctgtaaaatatttcacatcccaaatgtgaagaagtgaaaaagacttcgcagcagtcttcattgtggtgctcttcatgatcatagccccaggaacccttgaggttcttcttcacaaggctgagagtgcttccttcttgaagacgagtgacattcatcacttcagtgatccatgcatagaatatgaaaataaattcttccaactcatgggataaaggggactcccttgaagaatttcatgtttttgggctgtatagctctttacagaaaatgcacctttataaatcacatgaatgttagtattctggaaatgtcttttgttaatataatcttcccatgttatttaacaaattgtttttgcacatatctgattatattgaaagcagttttttgcattcgagttttaaacactgttataaaatgtagccaaagctcacctttgaacagatcccggtgacattctatttccaggaaaatccggaacctgattttagttctgtgattttacactttttacatgtgagattggacagtttcagaggccttattttgtcatactaagtgtctcctgtaattttcaggaagatgatttgttctttccagaagaggagacaaaagcaagatagccaaatgtgacatcaagctccattgtttcggaaatccaggattttgaattcgagatgaaacaaccagcaatcacagttaaatcttaactttgcctgcactctttgtaggaatgatcagaaatttatctttatcattctgagtgcttcaggagtacaataggaagaaagatactggagaaagcactaatgtaatcaccatgaagtctgacaacaggagcccattatttgcgtactgtcccaccctgtatcatggttctctgggaacaagctttatgattctcattagagtttatttgttgattgtcagtagttgcgacttttaaattatatttcccccactcaaagaatggtatctttatatatcaatgacattcaataaatgtgtattatttctaatgagaa

SEQ ID NO: 1619 - DNA, 6633 bp, Homo sapiens
cggcgccgcgcggccgcgctagaatggaggcgcccagcggcagcgagcccggcggcgacggggccggggactgcgcccacccggacccccgggcccctggcgccgcggcgcccagctccggccccggcccgtgcgcggccgcccgggagtccgagcgccagctgcgcctccgcctctgcgtcctcaacgagatcttgggcaccgagagggactacgtgggcaccttgcgcttcttgcagtcggcattcctgcatcgcatccggcagaacgtggccgactcagtggagaagggcctcacggaggagaatgtcaaggtcctgttctcgaacatcgaagacatcctggaagttcataaggatttcttggccgccttggagtattgtttacacccggagccgcagtctcagcatgaacttgggaatgttttcttaaaattcaaggacaagttctgcgtgtacgaggagtattgcagcaaccatgagaaagccctgaggctgctggtggagctgaacaagatccctaccgtgcgcgccttccttttgagctgcatgcttctgggaggccggaagaccacggacatccctttggaaggctacctgttgtctccgatccagaggatctgcaagtacccgctcctccttaaggagctggccaagaggactcccggcaagcacccagaccaccccgcggtccagagtgccctgcaggccatgaagaccgtttgctccaacatcaatgagaccaagcggcagatggagaagctggaagccctggagcagctgcagtcccacatcgaaggctgggagggttccaacctcacagacatctgcactcagctcctcctgcaagggactttgttaaagatctctgcgggcaacatccaggaaagggccttcttcctcttcgacaaccttctcgtctactgcaagcggaaatccagggtcaccgggagcaagaagtccaccaagaggaccaaatccatcaacggctccctctacatcttcaggggtcgaatcaacactgaagtcatggaggtggagaatgtggaagatgggacagcggattaccatagcaacggctataccgtcaccaacggctggaagatccacaacacggccaagaataagtggtttgtctgcatggccaagacggcagaggagaagcagaagtggctggatgccatcatccgcgagcgggagcagcgcgagagcctgaagctgggcatggagcgtgatgcctacgtcatgattgcggagaagggggagaagctgtaccacatgatgatgaacaagaaggtgaacctcatcaaggaccgccggagaaagctgagcactgtccccaagtgctttcttggcaatgagttcgttgcctggctcctagaaattggtgaaatcagcaagacggaagaaggagtcaacttgggccaagccctgttggagaatggcatcatccaccatgtttccgacaagcaccagttcaagaatgagcaggtgatgtatcgcttccgctacgacgatggcacctacaaggcccgaagtgagctggaggacatcatgtccaagggtgtgaggctttactgccgtcttcacagcctctacaccccggtgatcaaagaccgtgattaccacctgaagacctacaagtcagtgcttcccgggagcaagctggtggactggctgctggctcagggagactgccagactcgggaggaggcagtggcgctcggcgtgggtctgtgcaacaatggcttcatgcaccacgtgctggagaagagcgagttcagggatgagtcccagtacttccgctttcatgctgacgaggagatggaggggaccagcagcaagaacaaacagcttcgcaacgacttcaagctggtggagaacattctggccaagcgcctgctgatcctgccccaggaggaggactatggctttgacatcgaggagaagaacaaggctgtggtggtgaagtccgtccagaggggctcgctggctgaggtggctggcctgcaggtggggaggaagatctactccatcaatgaggacctggtgttcctgcggccgttttcagaggtggagtccatcctcaaccagtccttctgctcccgccgccctctgcgcctcctggtggccacgaaggccaaagagatcatcaaaatccccgaccagccggacacactgtgcttccagattcgtggagctgccccaccgtacgtctatgctgtggggagaggctctgaggccatggctgcagggctctgtgctggtcagtgcattctgaaggtcaatggcagcaacgtgatgaacgatggtgcccctgaggtcctggagcacttccaggcattccggagtcggcgcgaagaggccctgggcctgtaccagtggatctaccacacccatgaggatgcccaggaagcacgagccagtcaggaggcctccactgaggaccccagtggcgagcaggcccaggaggaagaccaggctgattcagccttcccactgctgtccctgggtccccggctgagcctgtgtgaggacagccccatggtcaccctgactgtggacaacgtgcacctggaacacggcgtggtgtatgagtatgtgagcacggcaggcgtcaggtgccatgtgctggagaagatcgtggagccccgcggctgcttcggcctcaccgccaagatcctcgaggcctttgctgccaatgacagcgtcttcgtggagaactgcaggcggctcatggccctgagcagcgccatcgtgaccatgccccactttgagttccgcaacatctgtgacaccaagctggagagcattggccagaggattgcctgctaccaggagtttgcagcccaactgaagagcagggtcagcccacccttcaaacaagcccccctggagccccacccgctgtgtggcctggacttctgccccaccaattgccacatcaacctcatggaagtgtcctaccccaagaccaccccctcagtgggcaggtccttcagcatccgctttggacgcaaaccctccctcatcggccttgacccggagcaaggccacctgaaccccatgtcgtacacccagcactgcatcaccaccatggctgctccctcctggaagtgcttgcctgctgcagagggtgatccccaaggccagggtctccatgatggcagcttcgggccagccagtgggacccttggtcaggaagaccggggcctcagcttcctactcaagcaggaggaccgtgagatccaggatgcctacctgcagctcttcaccaagctggatgtggccctgaaggagatgaagcaatatgtcacccagatcaacaggctgctgtccaccatcacagagcccacctcgggtgggtcctgcgacgcatccttggctgaggaggcctcctccctgcccctggtcagtgaagagagcgagatggacaggagtgaccatgggggcatcaagaaggtgtgcttcaaggtggccgaggaggaccaggaggactcaggccacgacaccatgagttatcgcgactcctacagcgagtgtaacagcaatcgagactcggtcctgtcctacaccagcgtgagaagtaacagctcctacttgggcagcgacgagatggggtctggagatgagctgccctgtgacatgcggatcccatctgacaagcaggacaagcttcatggctgcctggagcacctctttaaccaggtggactccatcaatgctctcctcaaggggccagtcatgagccgggctttcgaagagaccaagcatttccctatgaaccacagcttacaagagtttaaacagaaagaagagtgtacaatccgtggccggagcctgatccagattagcatccaggaggacccctggaacctccccaactccatcaagaccctggtggacaacattcagagatatgtggaagatgggaagaaccagctgctcctggccttgctgaagtgcacagacacggagctgcagctgcgcagagacgcgatcttctgccaggccctggtggccgccgtgtgcaccttctccgagcagctgctggcggccctgggctaccgctacaacaacaatggcgagtacgaggagagcagccgcgacgccagccgcaagtggctggagcaggtggcggccacgggcgtcctgctgcactgccagtccctgctctcgccagccacagtgaaggaggaacggaccatgctggaggacatctgggtgacgctgtcagagctggacaatgtcaccttctcctttaagcagctggacgagaactatgtggccaacaccaacgtcttctaccacattgagggcagccggcaggcgctgaaggtcatcttctacctcgacagctaccacttctccaagctgccctcccgcctggagggtggggccagcctgaggctgcacacagcgctgttcacgaaagtgctggagaacgtggaggggctgccttctccaggcagccaggccgcggaggatttgcagcaggacatcaacgcgcagtccctggagaaagttcagcagtattaccgcaaactcagggcattttacctggagcggtctaacctgcccacggatgccagcaccacggcggtaaagatagaccagctgatccgccccatcaatgccctggatgagctctgccgcctcatgaagtcctttgtccacccaaagcctggtgctgctgggagtgtgggcgccggcctcatccccatctcctcggagctctgctaccgcctgggggcctgccagatggtcatgtgtggcacaggcatgcagaggagcaccctgagcgtgtccctggagcaggcggccatcttggcacggagccacgggttgctgcccaagtgcatcatgcaggccacggacatcatgcggaagcagggcccaagggtggagattctggccaaaaacctgcgagtcaaggaccagatgccccagggtgctccgcgcctctaccgcctctgccagccgccggtggatggggacctctgaacacccaaatgccccacgctgggccgcggcctctggagctgggatttgggaggacacagcaggcagcgctggccttctccagggatggcccaaggcttccgcagccgcccgttccgggacctgcccagcgtcctccctgcctccttccgggacaagcctggccaccctcgctgtgatgacgagctggctgattggccctgggccggcccattcttcacacgcctgccagaagctggaggggtgctggagacccatagagctgatgggagcagctggtgcctggccttcggctcctgcgtccccagaacccaagggaacgtcatggaggccacatggggccacccggctccctcgggatggctccgcctgcacttttgaaaccccggtttccttcaacgtccacattccaggtgaccacacgtgtctcctcctcctcatcttagcttccaggttcaccctaaccctgtactaacctgcttggtggacttggaaaagacttggctctgtcgggaaaggagagacggggcctccatcacgcctgttaccagaggatccccgagagccacaccagctctggacatcaccgcccctggaactggggccaccagccctgggcacgagatttgctctgactttatttatatggcatgaaatctctggtttattttgggattttttgttgttggtgttgtcaaagtttgttttttctaaagttgtgtgattatatatttgacattttacatttcaaagaaaggtatgttgtctaacaggggaccaacagaaggtagtattgacaactgttcctgcttctactaaaaaaaaaagagcacaaaagaaaaactaaattattgaaaaattaaaaaatgtcattgtttcctgtttgttaatattagggttgtaaggtgtcgttttgaggtatcgactgtgattccttcccccaccctccattctccagcggttggccggtgttagaactcgctctctttgagtgactggctacaagggcctgagaggtggccagccagggttggagctggaggggatggagccccacctgaggtgccgtgtcacacgggttagagggtcactgggaaacaccgggcggtggcttctgtgatttattttcttgatggtaacttctcagagcagggcgattgggacatcaccagccagagcacaggaagccaccctgcctgctggggaggagggacccacacaagccccctcggcagtttgtccccccagcttcggtatgccttcagggaaaggtcacagctggggaggaagcggggggacgcctgtcacccctggcaggtggtgagttcaggtgggggctccctgctgcccccaggcctgggagcttgaagccctcccggcatctggcatccgagcctcccgccctccagggtgcgcttccctctcttgccgcagcatacacgagggcaggcagtggccttgtcactgtatcttgcatcagagacaaaggaggacccgctttagccctgctgcgggaaatgggggagggcccagggccagcgcattgtgcactggtttactttaaaatgtacagattcttctcgttaaattcttgatagattttttattattattaaaagtcagtttataatac

SEQ ID NO: 1620 - DNA, 1690 bp, Homo sapiens; identical to SEQ ID NO: 351

SEQ ID NO: 1621 - DNA, 1717 bp, Homo sapiens
gcgttttgccacagagccgtaaaggcgcgcgggaacatggggctgtatgctgcagctgcaggcgtgttggccggcgtggagagccgccagggctctatcaaggggttggtgtactccagcaacttccagaacgtgaagcagctgtacgcgctggtgtgcgaaacgcagcgctactccgccgtgctggatgctgtgatcgccagcgccggcctcctccgtgcggagaagaagctgcggccgcacctggccaaggtgctagtgtatgagttgttgttgggaaagggctttcgagggggtgggggccgatggaaggctctgttgggccggcaccaggcgaggctcaaggctgagttggctcggctcaaggttcatcggggtgtgagccggaatgaggacctgttggaagtgggatccaggcctggtccagcctcccagctgcctcgatttgtgcgtgtgaacactctcaagacctgctccgatgatgtagttgattatttcaagagacaaggtttctcctatcagggtcgggcttccagcctcgatgacttacgagccctcaaggggaagcattttctcctggaccccttgatgccggagctgctggtgtttcccgcccagacagatctgcatgaacacccactgtaccgggccggacacctcattctgcaggacagggccagctgtctcccagccatgctgctggaccccccgccaggctcccatgtcatcgatgcctgtgccgccccaggcaataagaccagtcacttggctgctcttctgaagaaccaagggaagatctttgcctttgacctggatgccaagcggctggcatccatggccacgctgctggcccgggctggcgtctcttgctgtgaactggctgaggaggacttcctggcggtctccccctcggatccacgctaccatgaggtccactacatcctgctggatccttcctgcagtggctcgggtatgccgagcagacagctggaggagcccggggcaggcacacctagcccggtgcgtctgcatgccctggcagggttccagcagcgagccctgtgccacgcgctcactttcccttccctgcagcggctcgtctactccacgtgctccctctgccaggaggagaatgaagacgtggtgcgagatgcgctgcagcagaacccgggcgccttcaggctagctcccgccctgcctgcctggccccaccgaggcctgagcacgttcccgggtgccgagcactgcctccgggcctcccctgagaccacactcagcagtggcttcttcgttgctgtaattgaacgggtcgaggtgccaaggtgagtgagtgggggcgtgcttgggaggcgcaggatggcaccggcacatctaacatctacacttctctagctcagcctcacaggccaaagcatcagcaccagaacgcacacccagcccagccccaaagagaaagaagagacagcaaagagccgcagccggtgcttgcacaccgccttgcacatagcagaggctccgggctgactccttcctggtgggaaaggaagatgcctgtcctctccgtggaggaccctgggccctcaccgcaggaagcagtttgggttttgaaaggttattgggtcccttccttgggctgtgttcttgctggtgagcaaagtgttgcctgcaaaaataaaatgcagaacgtactctaaaaaaaaaaaaaaaaaaaaaaaaa

SEQ ID NO: 1622 - DNA, 2073 bp, Homo sapiens
cgctgtttcgtgggaccaggattgaaacaagatggcgggttcgtggtgagaagccgtcaagcaggagtagaaattggtatgcttagaagcagattctaaaagcagtttctcttcagaacatcttttttcataccacttgataagcatcttgaaacaccatggctgtagctgcagtaaaatgggtgatgtcaaagagaactatcttgaaacatttatttccagtccaaaatggagctttatattgtgtttgtcataaatctacgtattctcctctaccagatgactataattgcaacgtagagcttgctctgacttctgatggcaggacaatagtatgctaccacccttctgtggacattccatatgaacacacaaaacctatccctcggccagatcctgtgcataataatgaagaaacacatgatcaagtgctgaaaaccagattggaagaaaaagttgaacaccttgaggaaggacctatgatagaacaacttagcaaaatgttctttactactaagcaccgttggtatcctcatggacggtatcacagatgtcgtaagaatctgaatcctccaaaagacagatgatgcggaggttcctgggggaatcaaagagaaatgtgcctcatttgccatttgagaaaatgcagtctggtgtattcagtaatatatagtaaagtaataatgataaaatatcttttcatatattagaatgtgtacttttatataaagtaattctggatttgacattctcatttagagaaacctattttcttttttctttttctattttagtgtttcatttatgtgcggtctccaatttaggacttttccatagtgccaaagccatacatattcagtagaacatcaataaattacatcagaaattcaacactttattataaaacgggcttcgtgttagataattttgctaaacagtaggctactgtaagtgttctgagcatatttaagacaggctagcattttcaatttacaatattttcaactgatagtaggtttattgggatgtaaccctatgataagttgagaaacatctctttttgtgtgtctactgtgatttaagtatttttaatcatcagccaagcattgttagtagtataaatatgattaataaaaatgtgcatggctttcctgaaggagattttttaattgcctttgagaataaactcataaggtctaccaagaaaataaatgttatgatgtttcagttggcttctaggaaataattaaattagtgatattttaatcaggttttactatctgctaggccccttccatcaattcttattaaattctcaaaataatcctttgaaaagggagtataattacattttacagtgactcgaaccttacccaaacaagtgggagagccaggagccaaactatcaggctccaaagcttttttttagtgcatcacaatgacaaaggggtggttttctttcacccaagaatgtgctttcctggaaatttttctagatagaatattatgtaatttgttttgaaggttttttttcctgactgtcttaaagattatgctagctttagaacacatgcaaacagctgcagctctgtgattaaaatgttaaggtcactagaatagtgttaggaaaatgttaatagataattctgctgcctctattagcttatgtatgatccttaatagcattgcttccccttcagtttctatttaggaggtgaagaatcttttaataaggtagaaagttgctttatttaaatttgtactgtagaatgtttgtgatacagtatttgtaaaattgatatgaaaaataatttctcaaagtctattgtttgatctagttattttaataaaggaactctagaagtttcaagtggccagtgaagtgtgaggaatagagagtaaaggaaataattaataatggtgaccctctgttaagtggtttactttttccattaatataaatttcatttggaaagattaaaaaaacaagtttgattgaacttgataaatcagaaatatttaaaaaaaaaaaaaaaaaaaaaaaaaaaaaaaaaaaaaaaaaaaaaaaaaaaa

SEQ ID NO: 1623 - DNA, 6501 bp, Homo sapiens
gtattctgaggatgttgtttgctttgggctaagaaaagaaaaaatacaactacagacaaagcctttatatctgcaagtattatggcgtggtcggtagcaatgtaattagatttacatcagtcttcctggtgagacttggaggctcttcctcggtagacatgagtgacccaaggcagtcacaagaagagaagcacaagctaggcagagcctcttcaaagttcaaggatccccctagaatcatgcagtcagatgattattttgctcggaaatttaaagccattaatggcaacatgggacccactacttctttaaatgcctcgaattccaatgagactggcggtggtggtccggctaatggtaccccagctgtgcccaagatgggtgtgagagcaagggtgtctgaatggcctcctaaaaaggactgttccaaggagctaacatgcaaggcactgtgggaaagccggtctcagaccagttatgaaagcatcacttctgtcctgcagaatgggcagagtgaccagagtgaaggtcagcaagatgaacagctcgatctggacttcgtggaggccaagtacacaatcggagacatctttgtccattccccccaaagaggacttcaccccataagacagaggagcaatagtgatgtcactatcagtgacattgatgccgaagatgtcttagaccaaaatgcagtcaaccccaacaccggggctgccctgcacagggagtatggaagtacttcatccatcgacaggcaaggcttatctggtgaaaacttttttgctatgctcagagggtaccgagtagaaaattatgaccacaaagcaatggtcccttttgggttccctgaatttttccgctgtgaccctgcaatctctccgagccttcatgcagcagcacagatttctaggggagaatttgtccgcatctcaggattagattatgtggacagtgccctcctgatggggagagacagggacaagcctttcaaacggaggttgaaatcagagtcggtggaaacatctctcttccgaaagcttcgaactgttaaaagtgagcacgaaactttcaagttcacgtctgagctggaggagagccgactggagaggggcattcgcccttggaattgtcagcgatgttttgcacattatgatgtccagagcattttgtttaatatcaacgaagccatggctacgagggctaatgtggggaaaaggaaaaacataaccactggggcatctgcagcatcccagactcagatgcctacgggccagacaggcaactgtgagtcccctttagggagcaaggaggacctcaactccaaagagaacctggatgccgatgagggtgatgggaaaagtaacgacctcgtccttagttgtccttactttagaaatgagactggaggggaaggcgacaggcggattgcgctctctcgagccaactcatcctctttcagttctggggaaagctgctctttcgaatcgtcactcagctctcactgcacaaatgcaggtgtctccgtcttggaagtgcccagagaaaaccagcctattcacagggagaaagtgaagcgctacatcatagaacacattgaccttggggcctattattaccgcaaattcttctatgggaaagagcaccaaaactactttggaatagatgaaaaccttggtccagtagcagtcagcatccggagagagaaggtggaagatgccaaggagaaagaaggatcccagttcaactacagggtggctttcaggacaagtgagcttacaacactgagaggagcaattttagaagatgctataccctctactgctaggcatggtaccgcacgaggactacctctcaaagaagttttggaatacgtcattccagagctgagcattcagtgtttgcgacaggcttccaactcacccaaggtctcagagcagctgctcaagcttgatgaacaagggctgagctttcagcacaagatcgggatcctttattgcaaagcaggccagagcacagaggaagagatgtataacaatgagacggcgggaccagcttttgaagaattccttgatcttctgggccagagagtccgactgaaaggatttagtaaatatcgagctcagctagacaataagactgattccacgggcacgcactctctctataccacatacaaagactacgaactcatgttccacgtgtcaaccctgcttccctacatgcccaacaacagacaacagctactgaggaaaaggcacataggaaatgacatcgtcaccatcgtcttccaggagcctggggcacttccttttactccaaaaagcatccggtctcactttcagcatgtctttgtcatagtcaaagtgcataatccatgtaccgaaaatgtgtgttatagtgttggagtttccagatcaaaagatgtgccaccatttggcccaccgattcccaaaggtgtaacttttccaaagtcagccgtgttccgggacttccttttagccaaagtaatcaatgcagaaaatgcagcccataaatcagaaaagtttcgagcaatggccactcgaacgaggcaggagtacttgaaagatctggcggagaactttgtcacaaccgccaccgtggatacctctgtgaagttcagcttcattacgctgggtgcgaagaaaaaggagaaggtaaagccaaggaaggatgcccacttgtttagcattggggccatcatgtggcacgtgatagcccgggacttcggccagtctgctgacattgaatgtcttctcgggatctccaatgagttcatcatgttgattgaaaaggattccaagaatgttgtattcaactgttcctgcagggatgtgattgggtggacatctggattagtgagtatcaaagtgttttacgaaagaggagaatgtgtcctcctgtcctcggtagacaactgtgctgaagacatcagggaaattgttcagcgattagtaatagtgacgagaggctgcgagactgtggaaatgaccctgaggaggaacgggctgggccagcttggcttccatgtgaattttgaaggaattgtcgcagatgtggaaccttttggctttgcctggaaggctggccttcgccaagggagccgcctcgtggagatctgcaaagtagccgtggccactctgacccacgagcagatgatcgacctgctccgtacttctgtgactgtgaaggtggtcatcatccagccccatgatgacggctcgccccgaagagggtgttcagagctctgccggatccctatggtggaatataaactcgacagcgagggcaccccctgcgagtataaaacccccttcaggaggaacaccacgtggcaccgggtgcccactcctgccctgcagcccctctctagagcttcccccatccccggcacgcccgaccggctgccgtgccaacagctgctccagcaggcccaggctgccattcctcgaagcacctccttcgaccggaagctgcccgatggcacgagaagctcacccagcaaccagtcatcctccagcgaccctggacccggcgggagcggaccctggagaccacaagtgggctacgacgggtgccagtcccctctactgctcgaacaccagggctcaggccctttggaatgtgacggagccagggagagggaagacaccatggaagcaagcaggcacccggaaaccaaatggcatggcccaccttccaaagtcctgggttcctataaagaaagagctctgcagaaagatggaagttgcaaagattcccccaataagctttctcacattggggataaaagttgctccagtcactccagcagcaacacgctctccagcaacacctccagcaacagtgacgacaagcactttgggtctggcgacctgatggaccccgaattactggggctgacctacatcaaaggggcctccaccgacagtggcatcgacacggccccctgcatgcctgccaccatcctcggccctgtgcacctggcaggcagcaggtccctgatccacagccgggccgagcagtgggctgatgctgccgacgtctctgggcctgacgacgagccagccaagttatattctgtgcatggctacgcgtccaccatctccgccggcagtgctgcggaaggcagcatgggcgatctcagtgagatatcctctcattccagtggttctcaccattcaggaagcccttcagctcactgttcaaaaagtagtgggtctctggattcatccaaagtctacatcgtgtctcacagcagcggacaacaggttcccgggtccatgtccaagccctaccacagacaaggggcagtgaacaaatatgtcatcggctggaagaaatcggagggcagcccaccgcccgaggagcctgaagtgactgaatgtcccgggatgtatagtgagatggatgtcatgtccacagcaactcagcatcagacagtggtgggagatgctgttgcagagactcaacatgttctgtctaaagaagattttctgaaattgatgcttcctgacagccccttagtggaggaggggcgaagaaagttttcgttctatgggaacctgtctccaaggaggtcgctttaccgcacgctgtctgacgagagcatctgcagcaacaggagggggtcctcctttggcagttcccggagttccgtgcttgaccaggccctgcccaacgacattctgttcagcaccaccccaccctaccacagcacgctgcctccgcgggcccaccccgcacccagcatggggagcctgagaaatgagttctggttctccgatgggtccttatcagataagtccaagtgcgcagatcctggcctgatgcccctcccggacacagccacagggttagattggacccacctcgtggatgctgcacgggcatttgaaggtcttgactcagatgaagaactggggctgctctgtcaccacacgtcctatctagaccagagggtggcatccttctgcaccctgacagatatgcagcatgggcaggacctggaaggggcccaagagctgcccttatgtgtagatccaggcagtggcaaagagttcatggacacaactggggagcgttctccatcaccactgaccgggaaagtcaatcagctggaattaattcttcgacaactccagaccgaccttcggaaggaaaaacaagacaaggccgttctccaagcagaagtgcagcacctgagacaggacaacatgagactgcaggaggagtcccagaccgcgacagctcagctgcggaaattcacagaatggtttttcaccaccatcgacaaaaaatcttagccaatccgcacctcatcaagggaccactgggaaatgccccttgtccctttgaagtcacaaacatgtggtttttctgtgtgctttcaaccaatcgtagatgtttttgctgttccattctgtgtagcaccattcaccacagcaggatagggagcctcgactctttctcggtaaccacggcagagagcagcgccgatgtgaagatgaatgaatgtaactcctggtgtgaagatgaatgtaaaccctggcgacagttgagacctttttcttttagactctgctaaaacagtgctctggcttgggcttacctcaagagggaagatagttgagttttatttcctgtatatcaggtgacctggtagagatgtaaagcaatttaccatagtttgggctttagtattgtaaaataaacatgagaacaaataatcagacatatactttaatgttaaaggtgctctatttttttggatgtacagtagttttatttccacagccacattaccatagcaataagaaaggaggcatagtacatagttggaaaagctttgtggggggattaaaaaaaaaaaaaagcactgttgtgtttaacactagttcagatgcagttaccttagagacttatttatttgcaggaacaaatggtgcctgaatattaacagtgttctgattaaaaacaaaaaaaagatacatatgccttgtaaatggctcaccgagtggtcagtagtcacttcaactcttagttcacttttgtatagttgctctgctggaaagaaatgagagtgaatctgcttactcactagaacttccctgtgtgctgtgagccagcggaaccacttgtacaatgccagatttgtttatctttgtacagaagctttgatgaagtgtcttgtatttaacacccttatttaagcttatttaaccttaaattgttaattttataaaatttggtttggcctgcactacgatgagggatggaggtagctgcaggctcagaagagactgagcttgcacagatcagaccgagaagcagggtgagagattctaacgactggatgctgctagtaacacattgtttgtattgctttaccatttttaactgttagatttgagatgaacatacattttgcttttttaataaatgtttaaaagaagtccacataagaaaaaaaaaaaaaaa

SEQ ID NO: 1624 - DNA, 8097 bp, Homo sapiens
cgaggccgccgccgtcgcctccgccgggcgagccggagccggagtcgagccgcggccgggagccgggcgggctggggacgcgggccgggggcggaggcgctgggggccggggccggggccgggggcggaggcgctgggggccggggccggggccgggcgccgagcggggtccgcggtgaccgcgccgcccgggcgatgcccgcggggacgccgccggccagcagagcgaggtgctgccggccgccaccatgaccgagggcgcacgggccgccgacgaggtccgggtgcccctgggcgcgccgccccctggccctgcggcgttggtgggggcgtccccggagagccccggggcgccgggacgcgaggcggagcgggggtccgagctcggcgtgtcaccctccgagagcccggcggccgagcgcggcgcggagctgggtgccgacgaggagcagcgcgtcccgtacccggccttggcggccacggtcttcttctgcctcggtcagaccacgcggccgcgcagctggtgcctccggctggtctgcaacccatggttcgagcacgtgagcatgctggtaatcatgctcaactgcgtgaccctgggcatgttccggccctgtgaggacgttgagtgcggctccgagcgctgcaacatcctggaggcctttgacgccttcattttcgccttttttgcggtggagatggtcatcaagatggtggccttggggctgttcgggcagaagtgttacctgggtgacacgtggaacaggctggatttcttcatcgtcgtggcgggcatgatggagtactcgttggacggacacaacgtgagcctctcggctatcaggaccgtgcgggtgctgcggcccctccgcgccatcaaccgcgtgcctagcatgcggatcctggtcactctgctgctggatacgctgcccatgctcgggaacgtccttctgctgtgcttcttcgtcttcttcattttcggcatcgttggcgtccagctctgggctggcctcctgcggaaccgctgcttcctggacagtgcctttgtcaggaacaacaacctgaccttcctgcggccgtactaccagacggaggagggcgaggagaacccgttcatctgctcctcacgccgagacaacggcatgcagaagtgctcgcacatccccggccgccgcgagctgcgcatgccctgcaccctgggctgggaggcctacacgcagccgcaggccgagggggtgggcgctgcacgcaacgcctgcatcaactggaaccagtactacaacgtgtgccgctcgggtgactccaacccccacaacggtgccatcaacttcgacaacatcggctacgcctggattgccatcttccaggtgatcacgctggaaggctgggtggacatcatgtactacgtcatggacgcccactcattctacaacttcatctatttcatcctgctcatcatcgtgggctccttcttcatgatcaacctgtgcctggtggtgattgccacgcagttctcggagacgaagcagcgggagagtcagctgatgcgggagcagcgggcacgccacctgtccaacgacagcacgctggccagcttctccgagcctggcagctgctacgaagagctgctgaagtacgtgggccacatattccgcaaggtcaagcggcgcagcttgcgcctctacgcccgctggcagagccgctggcgcaagaaggtggaccccagtgctgtgcaaggccagggtcccgggcaccgccagcgccgggcaggcaggcacacagcctcggtgcaccacctggtctaccaccaccatcaccaccaccaccaccactaccatttcagccatggcagcccccgcaggcccggccccgagccaggcgcctgcgacaccaggctggtccgagctggcgcgcccccctcgccaccttccccaggccgcggaccccccgacgcagagtctgtgcacagcatctaccatgccgactgccacatagaggggccgcaggagagggcccgggtggcacatgccgcagccactgccgctgccagcctcagactggccacagggctgggcaccatgaactaccccacgatcctgccctcaggggtgggcagcggcaaaggcagcaccagccccggacccaaggggaagtgggccggtggaccgccaggcaccggggggcacggcccgttgagcttgaacagccctgatccctacgagaagatcccgcatgtggtcggggagcatggactgggccaggcccctggccatctgtcgggcctcagtgtgccctgccccctgcccagccccccagcgggcacactgacctgtgagctgaagagctgcccgtactgcacccgtgccctggaggacccggagggtgagctcagcggctcggaaagtggagactcagatggccgtggcgtctatgaattcacgcaggacgtccggcacggtgaccgctgggaccccacgcgaccaccccgtgcgacggacacaccaggcccaggcccaggcagcccccagcggcgggcacagcagagggcagccccgggcgagccaggctggatgggccgcctctgggttaccttcagcggcaagctgcgccgcatcgtggacagcaagtacttcagccgtggcatcatgatggccatccttgtcaacacgctgagcatgggcgtggagtaccatgagcagcccgaggagctgactaatgctctggagatcagcaacatcgtgttcaccagcatgtttgccctggagatgctgctgaagctgctggcctgcggccctctgggctacatccggaacccgtacaacatcttcgacggcatcatcgtggtcatcagcgtctgggagatcgtggggcaggcggacggtggcttgtctgtgctgcgcaccttccggctgctgcgtgtgctgaagctggtgcgctttctgccagccctgcggcgccagctcgtggtgctggtgaagaccatggacaacgtggctaccttctgcacgctgctcatgctcttcattttcatcttcagcatcctgggcatgcaccttttcggctgcaagttcagcctgaagacagacaccggagacaccgtgcctgacaggaagaacttcgactccctgctgtgggccatcgtcaccgtgttccagatcctgacccaggaggactggaacgtggtcctgtacaacggcatggcctccacctcctcctgggccgccctctacttcgtggccctcatgaccttcggcaactatgtgctcttcaacctgctggtggccatcctcgtggagggcttccaggcggagggcgatgccaacagatccgacacggacgaggacaagacgtcggtccacttcgaggaggacttccacaagctcagagaactccagaccacagagctgaagatgtgttccctggccgtgacccccaacgggcacctggagggacgaggcagcctgtcccctcccctcatcatgtgcacagctgccacgcccatgcctacccccaagagctcaccattcctggatgcagcccccagcctcccagactctcggcgtggcagcagcagctccggggacccgccactgggagaccagaagcctccggccagcctccgaagttctccctgtgccccctggggccccagtggcgcctggagcagccggcgctccagctggagcagcctgggccgtgcccccagcctcaagcgccgcggccagtgtggggaacgtgagtccctgctgtctggcgagggcaagggcagcaccgacgacgaagctgaggacggcagggccgcgcccgggccccgtgccaccccactgcggcgggccgagtccctggacccacggcccctgcggccggccgccctcccgcctaccaagtgccgcgatcgcgacgggcaggtggtggccctgcccagcgacttcttcctgcgcatcgacagccaccgtgaggatgcagccgagcttgacgacgactcggaggacagctgctgcctccgcctgcataaagtgctggagccctacaagccccagtggtgccggagccgcgaggcctgggccctctacctcttctccccacagaaccggttccgcgtctcctgccagaaggtcatcacacacaagatgtttgatcacgtggtcctcgtcttcatcttcctcaactgcgtcaccatcgccctggagaggcctgacattgatcccggcagcaccgagcgggtcttcctcagcgtctccaattacatcttcacggccatcttcgtggcggagatgatggtgaaggtggtggccctggggctgctgtccggcgagcacgcctacctgcagagcagctggaacctgctggatgggctgctggtgctggtgtccctggtggacattgtcgtggccatggcctcggctggtggcgccaagatcctgggtgttctgcgcgtgctgcgtctgctgcggaccctgcggcctctgagggtcatcagccgggccccgggcctcaagctggtggtggagacgctgatatcatcactcaggcccattgggaacatcgtcctcatctgctgcgccttcttcatcatttttggcattttgggtgtgcagctcttcaaagggaagttctactactgcgagggccccgacaccaggaacatctccaccaaggcacagtgccgggccgcccactaccgctgggtgcgacgcaagtacaacttcgacaacctgggccaggccctgatgtcgctgttcgtgctgtcatccaaggatggatgggtgaacatcatgtacgacgggctggatgccgtgggtgtcgaccagcagcctgtgcagaaccacaacccctggatgctgctgtacttcatctccttcctgctcatcgtcagcttcttcgtgctcaacatgttcgtgggcgtcgtggtcgagaacttccacaagtgccggcagcaccaggaggcggaggaggcgcggcggcgagaggagaagcggctgcggcgcctagagaggaggcgcaggagcactttccccagcccagaggcccagcgccggccctactatgccgactactcgcccacgcgccgctccattcactcgctgtgcaccagccactatctcgacctcttcatcaccttcatcatctgtgtcaacgtcatcaccatgtccatggagcactataaccaacccaagtcgctggacgaggccctcaagtactgcaactacgtcttcaccatcgtgtttgtcttcgaggctgcactgaagctggtagcatttgggttccgtcggttcttcaaggacaggtggaaccagctggacctggccatcgtgctgctgtcactcatgggcatcacgctggaggagatagagatgagcgccgcgctgcccatcaaccccaccatcatccgcatcatgcgcgtgcttcgcattgcccgtgtgctgaagctgctgaagatggctacgggcatgcgcgccctgctggacactgtggtgcaagctctcccccaggtggggaacctgggccttcttttcatgctcctgttttttatctatgctgcgctgggagtggagctgttcgggaggctggagtgcagtgaagacaacccctgcgagggcctgagcaggcacgccaccttcagcaacttcggcatggccttcctcacgctgttccgcgtgtccacgggggacaactggaacgggatcatgaaggacacgctgcgcgagtgctcccgtgaggacaagcactgcctgagctacctgccggccctgtcgcccgtctacttcgtgaccttcgtgctggtggcccagttcgtgctggtgaacgtggtggtggccgtgctcatgaagcacctggaggagagcaacaaggaggcacgggaggatgcggagctggacgccgagatcgagctggagatggcgcagggccccgggagtgcacgccgggtggacgcggacaggcctcccttgccccaggagagtccgggcgccagggacgccccaaacctggttgcacgcaaggtgtccgtgtccaggatgctctcgctgcccaacgacagctacatgttcaggcccgtggtgcctgcctcggcgccccacccccgcccgctgcaggaggtggagatggagacctatggggccggcacccccttgggctccgttgcctctgtgcactctccgcccgcagagtcctgtgcctccctccagatcccattggctgtgtcgtccccagccaggagcggcgagcccctccacgccctgtcccctcggggcacagcccgctcccccagtctcagccggctgctctgcagacaggaggctgtgcacaccgattccttggaagggaagattgacagccctagggacaccctggatcctgcagagcctggtgagaaaaccccggtgaggccggtgacccaggggggctccctgcagtccccaccacgctccccacggcccgccagcgtccgcactcgtaagcataccttcggacagcgctgcgtctccagccggccggcggccccaggcggagaggaggccgaggcctcggacccagccgacgaggaggtcagccacatcaccagctccgcctgcccctggcagcccacagccgagccccatggccccgaagcctctccggtggccggcggcgagcgggacctgcgcaggctctacagcgtggatgctcagggcttcctggacaagccgggccgggcagacgagcagtggcggccctcggcggagctgggcagcggggagcctggggaggcgaaggcctggggccctgaggccgagcccgctctgggtgcgcgcagaaagaagaagatgagccccccctgcatctcggtggaaccccctgcggaggacgagggctctgcgcggccctccgcggcagagggcggcagcaccacactgaggcgcaggaccccgtcctgtgaggccacgcctcacagggactccctggagcccacagagggctcaggcgccgggggggaccctgcagccaagggggagcgctggggccaggcctcctgccgggctgagcacctgaccgtccccagctttgcctttgagccgctggacctcggggtccccagtggagaccctttcttggacggtagccacagtgtgaccccagaatccagagcttcctcttcaggggccatagtgcccctggaacccccagaatcagagcctcccatgcccgtcggtgaccccccagagaagaggcgggggctgtacctcacagtcccccagtgtcctctggagaaaccagggtccccctcagccacccctgccccagggggtggtgcagatgaccccgtgtagctcggggcttggtgccgcccacggctttggccctggggtctgggggccccgctggggtggaggcccaggcagaaccctgcatggaccctgacttgggtcccgtcgtgagcagaaaggcccggggaggatgacggcccaggccctggttctctgcccagcgaagcaggagtagctgccgggccccacgagcctccgtccgttctggttcgggtttctccgagttttgctaccagccgaggctgtgcgggcaactgggtcagcctcccgtcaggagagaagccgcgtctgtgggacgaagaccgggcacccgccagagaggggaaggtaccaggttgcgtcctttcaggccccgcgttgttacaggacactcgctgggggccctgtgcccttgccggcggcaggttgcagccaccgcggcccaatgtcaccttcactcacagtctgagttcttgtccgcctgtcacgccctcaccaccctccccttccagccaccaccctttccgttccgctcgggccttcccagaagcgtcctgtgactctgggagaggtgacacctcactaaggggccgaccccatggagtaacgcgcccggccccgatgcgaatcaggcctcccctacatctgggggcgttggccgcgagattcccattgacacctttgtttcgtgtgcttttaaattcaggttaaatgttgcaataatctgatgcagaagactcagcttctcaagggagagggagggggcggagcggaataaatagtaacttatttaagaaatgcaaaaaaaaaa

SEQ ID NO: 1625 - DNA, 2425 bp, Homo sapiens
gcggccgccggtcctccctccacctcctcctcggccccccctcgcttccctcctcccacttcccgagctccggcgtcgtcccggccacgctcgacgctgctgcaggaacaaaggaagaccccgcggcggcggcggcgccacctccgcctgctgctccgacccgctcccggcccgcggcggcggcaccagggcgcccggctcagccttcccggaggcctcggcccggcctcatcgtgccggcttcgcgcgcgaacccggctttcgcatttgggaccctgcaggaaaaatatggctcaggagactaaccagaccccggggcccatgctgtgtagcacaggatgtggcttttatggaaatcctaggacaaatggaatgtgttcagtttgctacaaagaacatcttcagaggcagcaaaatagtggcagaatgagcccaatggggacagctagtggttccaacagtcctacctcagattctgcatctgtacagagagcagacactagcttaaacaactgtgaaggtgctgctggcagcacatctgaaaaatcaagaaatgtgcctgtggctgccttgcctgtaactcagcaaatgacagaaatgagcatttcaagagaggacaaaataactaccccgaaaacagaggtgtcagagccagttgtcactcagcccagtccatcagtttctcagcccagtacttctcagagtgaagaaaaagctcctgaattgcccaaaccaaagaaaaacagatgtttcatgtgcagaaagaaagttggtcttacagggtttgactgccgatgtggaaatttgttttgtggacttcaccgttactctgacaagcacaactgtccgtatgattacaaagcagaagctgcagcaaaaatcagaaaagagaatccagttgttgtggctgaaaaaattcagagaatataaattacttcttgtgaagagactgaaactttgtttttattttaatatatcgtaggaaaacattaaagagcagatgcatggccatttttctttgatgttctccagagttttacattacacttgtctgtcttataattgatattttaggatgtttgggtgtttgttacaggcagaattggatagatacagccctacaaatgtatatgccctcccctgaaaaaaattggatgaaaatctgcacagcaaagtgaaacacacagataataggaacaaaatgtagttcccatgtgccaaacaaaataaatgaaatctctgcatgtttgcagcatatctgccttttgggaatgtaatcaaggtataatctttggctagtgttatgtgcctgtatttttttaaaatggtacaccagaaaaggactggcagtctacttctaccatagttaaacttcaccctctttaatttcacaacatattctttggaagcaggaagaaatgctcataaagaggatcagaccttctttcccgtgaaaccagtatttggcgccatatataagcctggttaaattggtcatctaaagctgtcaaataagacattctgtgaaaggtaaacatcgaaactggttataagtaaaaccatcaagccaacaacagggtcttgagataacctttgaagcttattgtactggcctgcaccagaagatgtctgcattactcattgctaaaaatgtgtagcacagaactgcactaggattaatttgtttacaagaagaaatttaaactctacgtttggttttcacatacagcagctctattgaataacatgcatctgaattttaagttgcaaaggtatctgaataatttttcatgtgcatcttttgtcgaatgttttggttcaagaaagaatgtttaaagctttttaaaagacttcagttcttaatgtaactgtacccttctgcatggaaaatcataaccaacatggctgcagtagacttcttagtggtatccagcgccacttgcagagggctgctttatcatattgtacttgggtgtaggactctagtgttcttgggtgtattgcatgggctgcattatctacagcattgtacaataacaactagaaaaggcagtatacttcactgatgcttgtctggtaataatcacttctgtgttataatggaaggttttttgtgatgtatgaaacttgtgttttttatatataaatgagtatagttagtgttgtggtaatgcctgttttcatctgtaaatagttaagtatgtacacgaggcactacttctgatttattgcaatgttcagtcctagtttttacttttattcttaaagcattcagttttgctttcaattttatgtaccttagttctgagttagacctgcagatgtgtacagatagttcatatttatgtattgcacataatcatgctattcagcattgatgctatattgtattatgtaaataataaaagccatgtacagagggaaa

SEQ ID NO: 1626 - DNA, 6448 bp, Homo sapiens
cctactcggagaaaacctactttatcttatttaaattagggtcctccaagcgatcttaacatctcctaagtcccaagcaccctgtttttttcctgatactttttccgtttaccttaaggtctgtgtcaacctgacagtaagctgcacgatggcaggggtcttgcctactaggttccctgtgcacagcagcccgtcaacagtagttgaataaacatcataggtcacaataaccctgggactgcctcttggggaggtagccgcaaactctcgcaggtggcagtgacaccagtacttctccggggggttgttcgagtggaggaatactcttacgtgaaagtgctcagtacaccactgcggcaggaaggaggaagggaagaattccagatggggagaaagtaatattttgcagcacagtacagggtaaactgggtccaggtgggcgtagccgccgcgacaccttcacgtgaccgcggacagcttaaggaccccgcatccagtgcgcctgcgctggagctcccggaagttgccggacccggaacgcaggcggagcgcaagtctgtcagccagtcagtccgccagtccgccagcccagtacctctctctcctcggccctcgtaagctgtccgcggtctgtttggcccgaacggcggcggaggcgctgatcatggcgacattcatctcggtgcagctgaaaaagacctcagaggtggacctggccaagccgctggtgaagttcatccagcagacttacccaagcggcggggaagagcaggcccagtactgccgcgcggcggaggagctcagcaagctgcgccgcgccgcagtcggtcgtccgctggacaagcacgagggcgcgctcgagacgctcctgagatattatgatcagatttgttctattgaacccaaattcccattttctgaaaatcagatctgcttgacatttacctggaaggatgctttcgataaaggttcactttttggaggctctgtaaaactggctcttgcaagcttaggatatgaaaagagctgtgtgttgttcaattgtgcagccttagctagccaaattgcagcagaacagaacctggataatgatgaaggattgaaaatcgctgctaaacattaccagtttgctagtggtgcctttttacatattaaagagacggttttatctgccttaagtcgagagccgaccgtggacatatctccagatactgttgggaccctcagtcttattatgctggcacaggctcaagaagtattttttttaaaagccacaagagataaaatgaaagatgccatcatagctaaattggctaatcaggctgcagattattttggtgatgctttcaaacagtgtcaatacaaagatactctccccaaggaggtgttccctgtcttggctgcaaagcactgtatcatgcaggccaatgctgagtaccatcagtctatcctggcaaaacagcagaagaaatttggagaagaaattgcaaggttacagcatgcagcagaactgattaaaacagtggcatctcgctatgatgaatatgttaatgtgaaggatttttctgacaaaatcaatcgtgcccttgctgcagcaaagaaggataatgacttcatttatcatgatcgagttccagaccttaaagatctagatcctattggcaaagccacacttgtgaaatctaccccggtcaatgtacccatcagtcagaaatttactgatctgtttgagaagatggttcccgtgtcagtacagcagtctttggctgcctataatcagaggaaagccgatttggttaacagatcaattgctcagatgagagaagccaccactttggcaaatggggtgctagcttcccttaatcttccagcagcaattgaagatgtgtctggagacactgtacctcagtctatattgactaaatccagatctgtgattgaacagggaggcatccagactgttgatcagttgattaaagaactgcctgaattactgcaacgaaatagagaaatcctagatgagtcattaaggttgttggatgaagaagaagcaaccgataatgatttaagagcaaaatttaaggaacgttggcaaaggacaccatccaatgaactgtataagcctttaagagcagagggaaccaacttcagaacagttttagataaagctgtgcaggcagatggacaagtgaaagaatgttaccagtctcatcgtgacaccatcgtgcttttgtgtaagccagagcctgagctgaatgctgccatcccttctgctaatccagcaaagaccatgcagggcagtgaggttgtaaatgtcttaaaatccttattgtcaaatcttgatgaagtaaagaaggaaagagagggtctggagaatgacttgaaatctgtgaattttgacatgacaagcaagtttttgacagccctggctcaagatggtgtgataaatgaagaagctctttctgttactgaactagatcgagtctatggaggtcttacaactaaagtccaagaatctctaaagaaacaggagggacttcttaaaaatattcaggtctcacatcaggaattttcaaaaatgaaacaatctaataatgaagctaacttaagagaagaagttttgaagaatttagctactgcatatgacaactttgttgaacttgtagctaatttgaaggaaggcacaaagttttacaatgagttgactgaaatcctggtcaggttccagaacaaatgcagtgatatagtttttgcacggaagacagaaagagatgaactcttaaaggacttgcaacaaagcattgccagagaacctagtgctccttcaattcctacacctgcgtatcagtcctcaccagcaggaggacatgcaccaactcctccaactccagcgccaagaaccatgccgcctactaagccccagcccccagccaggcctccaccacctgtgcttccagcaaatcgagctccttctgctactgctccatctccagtgggggctgggactgctgcgccagctccatcacaaacgcctggctcagctcctcctccacaggcgcagggaccaccctatcccacctatccaggatatcctgggtattgccaaatgcccatgcccatgggctataatccttatgcgtatggccagtataatatgccatatccaccagtgtatcaccagagtcctggacaggctccatacccgggaccccagcagccttcataccccttccctcagcccccacagcagtcttactatccacagcagtaatatgtctgctcagcagctcagctgattcagatcagagggaaagaaataccaaccctgcaataagtgtactaaactctacgctctggttaatgtaatgtactctcctggactgaatgcagtgtataatttctgtctacagctagaagctgtgccccagttccacatttgattacacatgtgagatttgctgctgttgcagtataaacactaggtataataggatttgaaattgcattacagttcataaaaattgaaaatgagaaattaaacctgcaagtgaaacatttgaaacgattatactttctacataagacatggttgggacatcagatacttacaaagatggtttaagtatggatactagagaaaattaagttttctttctctttggtttattgatttggtttaatttccattatgctattttgcataatcaaggcactgtaaatcttataattttaaaataaattacttaagaacagttgtcattgttatgttttgttattgattctcattactgtctaattttttttctggtattagtctcattttgtatgtatataagttaaacagatactgtttttaagtgcatgaatagtacaagttattatcaaggatgttttacagggaaatcaaaagaatattatcatactttatctttcgtatgctgattagtaaacgatttttgacatttattttagaaagtcctataatgtggaagaaacaaacagttgctaccaaagattcttcaaataaacatacaaataaatgtgtatatttaatgttttattgttagcttctccagaaaattgatgcaaattctggtaataattcttgcattttttccccataacctggttaaaataaatacgccattggcaatacttcataatgtaatggaattgtttggggaacacttactgtaccctctcatcctttttccaccttactgtgttaacttagtgacatttaatgcccaatatgtatgaatagatctaagccatttaattttttttccttaaagattggagtattttataattcaaggagcatacaaaacaatggttgggaacatatgccaattatggaataggctatgtatttaatattaatctctgccattaggatatctactcactgtataaacctcagtaaaaatagtgaagacatgcatcatggaatgagaaaatgagaaaggaatgagttgtctaacatcacagtgggatctgttttttgtgaggttcatttctgaacacattaggcatatgagcagatttccagtgaatctatttatgtttattttctgagtttcaacgctgaccttttcttgcattattgtttcattttaatgatagtgttacttgtcccactgttgttttcattgagtttggatttatattttaaatgttcgaatgaaagtatgattgtaaaagggagtgaattggtttaaaaatatatgtatattttaaactttgttgtgtgtaggaaacatgaaggcatgttaattcaatataaatgacctttgatttcatggaatattaaagttggtttaaagtccaatagttaaaccttagcaaaaatagctttttactttatcagttgctaagatttaatactttggattcatcaaagtgtgacatgggcttgtttgacttctgtaagtggcatttaagttccacattcttattacttgaggtactttatactaacataagacagtgagagttagaggtattacaagttgctagtttataatgtcttactaatgcagaaacaaggaaaaaagcaaaattggcctgaatattctcttggggaaagagggcaccaaagaaaagggtaagtgcatctgagggccaaaagagatgtataagccttttagcccattccccatgctgggcctgctcacagagccacaggaagatcattcagaaactaggaaaggaggcccccacagctgatcctgccacagcacacctgactcactcggctctgttagtgtaaccttttaaatgtagcaacacaaaccctttccctcttgtcagttcactcatcctttggtttctttttaatcacctgtgtctgggcacagacaatcacaataaatgcagccctttattactgttaaggatcatactgttggtttggagttggaagggtactactctgtgattcaggtgtgttgtacccatatttataattaggctttattatcttcctaaatcaaggaaaggaaatcatccccagaccatttatgctgagctttggaatactattttaaactggattgtacttaaataatgaagctctgcatagaggaactagtcagaagtggggaaaacactgtctaatttttatcagtctggtataaagtattgatctaagagaactctccctgtgccccttggtctttattctcaattaagaaaaacagtcacatgtcacgacaaaccaatcaatctttatgagatattcctgtatccataccccagcttgtttgcaatttataaacctccccttcaaaactaaggagttgcagaaaaaaatggatttcacagagccttgtgtccctaaagttctgtcccagtcagcagtctttatagtccaaacagattataaaaaatgttttccatttgaactttacagtttgcaaaagtgcttttatacattttctaatttcagaaacaggataatttgttaagtgggtttcagtttgctaatagggattttttgtgttttgttttttaattttcagcatctcttgaagaatcttgctacagccaaatggcatctcactttttaaagacgtttgcaattattagttgattcacagtacagaacaaggtataaaggaaaaaaccctgctaggtagtgttataattgctagattaaaaatagactagaacaggttcattttaagatttacttggaagagcaaagaaggaaaaattatatttttaaagaaagagaatattcaggctttatttctggtatgaagtttatattttttaaaaaaatcctatattatcacaccagagattttagattcttttctggttagaaacattgctggtagttggattatatttttattgtattcatttatcttagggggaacattgtaaagaaacaaaaaggtccagatgaatgtatgctagaaataaaagttgaaagattctt

SEQ ID NO: 1627 - DNA, 3446 bp, Homo sapiens
agccaggagtgggcaacgcggcgtgagcagcggcccgaggctcccggagcatcgcgctgggagaagacttcgccgctcggggccgcagcctgtgtgatctcatcgccgccctgtcgtgacttcatcaatgtcgtgttgtgacctggctgcggcgggacagttgggcaaggcgagcatcatggcctcggattgcgagccagctctgaaccaggcagagggccgaaaccccaccctggagcgctacctgggagccctccgtgaggccaagaatgacagcgagcagtttgcagccctgctgctagtgaccaaggcagtcaaagcaggtgacatagatgccaaaactcggcggcggatcttcgatgctgtcggcttcaccttccccaatcgtctcctgaccaccaaggaggcgccggatggctgccctgaccatgttctgcgggctttgggtgtggccctgctggcctgcttctgcagtgaccctgaactggccgcccatccccaagtcctgaacaagattcccattcttagcaccttcctcacagcccggggggacccggacgatgctgcccgccgctccatgattgatgacacctaccagtgcctgacggctgtagcaggcacacccagagggcctcggcacctcattgctggtggcaccgtgtctgccctatgccaggcatacctggggcacggctatggctttgaccaggccctggcactcctggtggggctgctggctgctgccgagacacagtgctggaaggaggcggagcccgacctgctggccgtgttgcggggcctcagtgaggatttccagaaagctgaggatgccagcaagtttgagctctgccagctgctgcccctctttttgcccccgacaaccgtgccccctgaatgctaccgggatctgcaggccgggctggcacgcatcctgggaagcaagctgagctcctggcagcgcaaccctgcactgaagctggcagcccgcctggcacacgcctgcggctccgactggatcccggcgggcagctccgggagcaagttcctggccctgctggtgaatctggcgtgcgtggaagtgcggctggcactggaggagacgggcacggaggtgaaagaggatgtggtgaccgcctgctatgccctcatggagttggggatccaggaatgcactcgctgtgagcagtcactgcttaaggagccacagaaggtgcagctcgtgagcgtcatgaaggaggccataggggctgttatccactacctgctgcaggtggggtcagagaagcagaaggagccctttgtgtttgcctcggtgcggatcctgggtgcctggctggccgaggagacctcatccttgcgtaaggaggtgtgccagctgctgcccttcctcgtccgctatgccaagaccctctacgaggaggccgaggaggccaatgacctttcccagcaggtggccaacctggccatctcccccaccaccccagggcccacctggccaggagacgctctccggctcctcctgcctggctggtgccacctgaccgttgaagatgggccccgggagatcctgatcaaggaaggggccccctcgcttctgtgcaagtatttcctgcagcagtgggaactcacatcccctggccacgacacctcggtgctgcctgacagcgtggagattggcctgcagacctgctgccacatcttcctcaacctcgtggtcaccgcaccggggctgatcaagcgtgacgcctgcttcacatctctaatgaacaccctcatgacgtcgctaccagcactagtgcagcaacagggaaggctgcttctggctgctaatgtggccaccctggggctcctcatggcccggctccttagcacctctccagctcttcagggaacaccagcatcccgagggttcttcgcagctgccatcctcttcctatcacagtcccacgtggcgcgggccaccccgggctcagaccaggcagtgctagccctgtcccctgagtatgagggcatctgggccgacctgcaggagctctggttcctgggcatgcaggccttcaccggctgtgtgcctctgctgccctggctggcccccgctgccctgcgctcccgctggccgcaggagctgctccagctgctaggcagtgtcagccccaactctgtcaagcccgagatggtggccgcctatcagggtgtcctggtggagctggcgcgggccaaccggctgtgccgggaggccatgaggctgcaggcgggcgaggagacggccagccactaccgcatggctgccttggagcagtgcctgtcagagccctgaggggtgtccaccggggacagacccaggggcgggcagagagggaaggagggaggaggcatcttccctgaagcccccaatctggcccccccctccccagacttcctccccaaaacaccccagctttctggcttttctgagggcaagggcatggtgcccacccctcaagtgtaaggaactgcgttccgcccctcaggcccccatgggggcagggatcggcttggaaatcaacgtggttgtccccgccaggccggggaaggttggagcagcccccagggaggggggcactaggtgtcattgtgcccgatgtctggctcccctgcaggagggaggctccagggtaagacagggctggcaggagcagactgcctcagcccatgtgccctgccggccagggcgtgggctcccctcggctgtggtgcctcctctggccccccaggtccacgtcctttaaattggccctttggctcttgcccttggctcccttgggcagacagcaggcttaggccattgatatcgcagttcttcctatcagcttcagtgacccagggtctgaactgcctccatcctagggcaacctggggcagacaggcctggtggggggtggggaaacctccttccacctgagcttgcttgaagggacccagagtctttgggcccagatctttaaacctttgtgtcgtgttgcagcagagtgacgatgggggttggggggttatttattttgcctgtccttatccctgcttggacacctgagcatctgattcctgtccccctggtgccatctggcctggctggagccaggaacaggagggacacttccccagaatccgcatgtttccccagtgattacactccactgccaccgtggtgcctggctttaactcccacccctgctatgactcctctctgcagagacgcgactggcggctccagcagggactacctttcttataaacccagggggaccacacacacacacacacacacacacacacacacacacacacacacacacactcttgatcccttgcttccctcccccagtgcgttctgtgatcgccaagttcaaagctgtgcacatgtggacactcaataaatgttcattggtgacgagaaaaaaaaaaaaaaa

SEQ ID NO: 1628 - DNA, 1287 bp, Homo sapiens
ccctttcgctgcggcctttccccaacccggacccggcacttctcgggttccgcgactgccgatcgccccggcgcggcaccgctccctcaggagtcgcctaggccgcgcagtctcccgacttctcgtcaggctttcgcgccggcgctccagcaatcactggctggagaaggtgggcgttccggctcgagaggaccctgccgcggctccggaagagcctcgtcctgggcggcggtggtgcggcggtcgccgttatggccactgggctgggcggctgaccgcgggctaggaaagggcccagggcccgaatctcggtggccgctgctccagcgcggcctgcgccatggcctcctccgccgcctcctcggagcatttcgagaagctgcacgagatcttccgcggcctccatgaagacctacaaggggtgcccgagcggctgctggggacggcggggaccgaagaaaagaagaaattgatcagggattttgatgaaaagcaacaggaagcaaatgaaacgctggcagagatggaggaggagctacgttatgcacccctgtctttccgaaaccccatgatgtctaagcttcgaaactaccggaaggaccttgctaaactccatcgggaggtgagaagcacacctttgacagccacacctggaggccgaggagacatgaaatatggcatatatgctgtagagaatgagcatatgaatcggctacagtctcaaagggcaatgcttctgcagggcactgaaagcctgaaccgggccacccaaagtattgaacgttctcatcggattgccacagagactgaccagattggctcagaaatcatagaagagctgggggaacaacgagaccagttagaacgtaccaagagtagactggtaaacacaagtgaaaacttgagcaaaagtcggaagattctccgttcaatgtccagaaaagtgacaaccaacaagctgctgctttccattatcatcttactggagctcgccatcctgggaggcctggtttactacaaattctttcgcagccattgaacttctatagggaagggtttgtggaccagaactttgaccttgtgaatgcatgatgttagggatgtggatagaataagcatattgctgctgtgggctgacagttcaaggatgcactgtatagccaggctgtgggaggagggaggaaagatgaaaaaccacttaaatgtgaaggaacaacagcaacaagaccagtatgatataccaaggtaataaatgctgtttatgacttctttaaaaaaaaaaaaaaa

SEQ ID NO: 1629 - DNA, 4775 bp, Homo sapiens; identical to SEQ ID NO: 181

SEQ ID NO: 1630 - DNA, 1038 bp, Homo sapiens
tggggaggtcctccatgcgcagtcatgagtcgcttcaagtttatcgatattggtatcaacttgactgaccctatgttcagaggaatttataggggggttcaaaagcatcaagatgacttacaggatgtaatagggagagctgtcgagattggtgttaaaaagtttatgattacaggtggaaatctacaagacagtaaagatgcactgcatttggcacaaacaaatggtatgtttttcagtacagttggatgtcatcctacaagatgtggtgaatttgaaaagaataaccctgatctttacttaaaggagttgctaaatcttgctgaaaacaataaagggaaagttgtggcaataggagaatgcggacttgattttgaccgactgcagttttgtcccaaagatactcaactcaaatattttgaaaaacagtttgaactgtcagaacaaacaaaattaccaatgtttcttcattgtcgaaactcacatgctgaatttttggacataatgaaaagaaatagagatcggtgtgtagggggagtggtgcattcatttgatggtaccaaggaagcagcagctgctttgattgacttggatctttatataggatttaatggttgctcactgaaaactgaagctaatttggaagttttgaagtcaattcctagtgaaaaattaatgattgagacagatgcaccttggtgtggagtcaaaagtacacatgctggatcaaaatatataagaactgcatttcctaccaaaaagaagtgggaaagtgggcactgcttaaaagacagaaatgaaccctgccatataattcaaatattggagataatgtcagcagtgagagatgaggatccactggaattagccaatacactatataacaatactattaaagtattttttcctggaatataattggtatatgtcttccactttccatcatgtatgtaaaatttcatagtaaaacttcctgatagtttcaataaagaaattatctgcaaaaaaaaaaaaaaaaaaaaaaaaaaaaaaaaaaaa

SEQ ID NO: 1631 - DNA, 5702 bp, Homo sapiens
gccctggtgccaggcgctcagctcggcgctcccctgtgctcgcccggcgcccactcattcgcagcccggccttcgtcgccgccgcctccctgctgctcctcctcctttccccagcccgccgcggccatggcggacagcgccagcgagagcgacacggacggggcggggggcaacagcagcagctcggccgccatgcagtcgtcctgctcgtcgacctcgggcggcggcggtggcggcgggggaggcggcggcggtgggaagtcggggggcattgtcatctcgccgttccgcctggaggagctcaccaaccgcctggcctcgctgcagcaagagaacaaggtgctgaagatagagctggagacctacaaactgaagtgcaaggcactgcaggaggagaaccgcgacctgcgcaaagccagcgtgaccatccaagccagggctgagcaggaagaagaattcattagtaacactttattcaagaaaattcaggctttgcagaaggagaaagaaacccttgctgtaaattatgagaaagaagaagaattcctcactaatgagctctccagaaaattgatgcagttgcagcatgagaaagccgaactagaacagcatcttgaacaagagcaggaatttcaggtcaacaaactgatgaagaaaattaaaaaactggagaatgacaccatttctaagcaacttacattagaacagttgagacgggagaagattgaccttgaaaatacattggaacaagaacaagaagcactagttaatcgcctctggaaaaggatggataagcttgaagctgaaaagcgaatcctgcaggaaaaattagaccagcccgtctctgctccaccatcgcctagagatatctccatggagattgattctccagaaaatatgatgcgtcacatcaggtttttaaagaatgaagtggaacggctgaagaagcaactgagagctgctcagttacagcattcagagaaaatggcacagtatctggaggaggaacgtcacatgagagaagagaacttgaggctccagaggaagctgcagagggagatggagagaagagaagccctctgtcgacagctctccgagagtgagtccagcttagaaatggacgacgaaaggtattttaatgagatgtctgcacaaggattaagacctcgcactgtgtccagcccgatcccttacacaccttctccgagttcaagcaggcctatatcacctggtctatcatatgcaagtcacacggttggtttcacgccaccaacttcactgactagagctggaatgtcttattacaattccccgggtcttcacgtgcagcacatgggaacatcccatggtatcacaaggccttcaccacggagaagcaacagtcctgacaaattcaaacggcccacgccgcctccatctcccaacacacagaccccagtccagccacctccgcctccacctccgccacccatgcagcccacggtcccctcagcagccacctcgcagcctactccttcgcaacattcggcgcacccctcctcccagccttaatgcatgagcttagtctgaatttcaagttgggactcatccaatggagccgtctactcaacgccaaaggcttccttctctggcatatttggatatgacttatttgcactgaggttatctaggcttcactatccattgtgttgtaaatgtttgtcagaaatgcagccagtgttgtgggtctacaacactaaccagacgactttttccatcagtgttttacttgaatcttcatgtacgtccattccctggctggaaccttcgctgtttggtatttggtatttcagcagcagtgtgcaatttttgcttggcccagagcttcattctcctggcttttaggtttgtaaaagaaaaagggatatcttttttatatttttttccatgaatctgcagaaaattactgagctgttgttaccctcctctcattataatagtgtttaccaaacataccaataattcagcactacaattcagacctttgaaaatctggctttcagtgtagaacagaaagttagatgaatcagtgcccaagacatattttctgtttaacagaactttctacagatacattttttacaggttattttcattgtgttattgacatccatgtctctcgtaaaacagatggcccaaagtaatgaatcatgtggctgtaccttctccacataaatgggatggataattatcgtatattaagatgtgattctcttttttatccttaatgttaatctacttaacctggccccctctaacatgagtcgataaatgttgtcctactcaccggtggtttcaatggctaattagaatgtgttatttgatttctgctgcagaaggcagtgtgattgtaacaaaaacaatgcggcttccccctttcgtacttcatttgtgttctcttaaaatagagtttgaacaaatattttaaaggtgcaaaataccattagaaaatactatttgaaatggacattatcgcattatcttggcataatggccagaaaatattgtattgcttggcagaaaagaaaataaggtctaaaggaaagtagcacattagcattgatggctgttcatttcacccagtataagcaagtgcagtgtacaaagaagtatattctgaatacattatttccattcatttagcacaaataaatcatttggtttcactttgcagtggaacactgagtcactcttttcttaacacgtgcaacatcttaatttttgtttttcagcagttgctgttttgtactttggtagtgaagtgatttttaccacctgtgtttgcatatttatatatgctgtggatgaaaataacttactagagaatgtatattttatgacaagaatgtgtatctgttggatataatcagagaactgaaaagtaatttatcagtaatttttaagagtccatgttttgtgacaaccatctctaatagccaactctttattaaacacactcctaaaaataaggaaccatgacattgtagatatttaatattgtacagtatagaaacctccatttttgccttcgaatgcatatttaagagttaacagaatgaaaaaaaaaagtcttgttggataatagtgtttgactagcgttttaagaacttgagagtaaaagcaacaataagattttttcacctcttcctgcttccacccccaaactgagaacatcactcaattgtttggaagaaactgtaggtctatataaattttatttataatgtatgtgtaatatacataatcataatacagttctcagatgcagggaagaagtttggcatttaatcattgaggctttaggtttttgatgtgatcagactgggccatgtcaaacccggaattttcaccaacagttcactcaccctcctggtacattgccattccaaggaattctgagagtaggcaaacaaattttgccttcatggtacagttctcagtttttcttataggagaaatatggtatatgtttataagaatcttttatgagattatagatttcaatgctgtggatagtgtcttgcacccaaacaagaaagtccataatggaatgatcttccctcagcttcctatcgatttagttacctcttgaaagcacaaaaattaaaacattgccatatgttgaatttttaaaaagcacttggagtgagcgaacatttcctgataaatgccttttagagataggttcttgatattcagacatctgcagaaatgttctggttcccaaagtcatttcacttcgaaataaaacacagctccttcaaacagcactttttccacataaatctagttgcctctccctgtggacattcagaactgatagaacaaacactactcttttgaatttgatggttcgtgtcctttaaagtgtttgaggacctatgcagagcctgtaacacttgggtagtacctgctaggacaatttcttggcaattgtcttactactagggatcagtaagatttagattctgagcccataatggcaacagccccctcacctatgggaagctgacttccctcagtcgggcacttctcatgggggctgaacatggttcctgccattctgttacccactctcccaggtgagccctggattggctcccagaaggcctttgtaaaatcagtagccatcctgcaggcaggtgggagcaacaggggcttcagtagcttcattttcctgtcttgcagacagagacccttggctaccactgtgctgctaataggataagtactctgttgccagattaccatgccttttatacaaaaccaaattaacttacctaatacctgacacctctttgggctctgaactgctttctctcatcaagcatgctagcactctagacagaattctagaaatttggcagacagtggaagcctttaattgaacttactccttcgttgactgaaaggagttttaaattctgagctcctgagatactgactagcaaccatggaatgaatgtgtgaccagaaagtggctttgacaccaagtgctactgtccctttgtaattggcttctaacagattcaaccagaaataattgataatgtgaatttttgttaattgttcacttgtaggaaaatagaacatgtatcaccctttgttaggtagacatgaacttttcctgcacaaagccttgcttttagagaatgcccaataaggcaagaaaaagcatagtaacttgtgctttgagagctcaatatttgtatcttatcagtacagaagaaatatttctgtgtaacttgatcttctgtctagtacttgtcttataggtaaccaacactgaaaactttgtagtgatgactaccaaagaaatacatagtaaaacaaccttttatttccaaattgttaaagagccagccattgatgctgctacatgagttccatgctcaagagccattgtaagagattaaggggtttctaggtttttggtgattttttgtttgtttttttctttgttttttagggtttttttttcttctttaattttttgattaaaacatacacacagctgttagcataaagtcgtggggggcattttctggaatgctcagcagttctgattaactgccaagcccaggttgcctctcatgaggcaactgaaaaaatcctgtgtcttgatagcatgggtgctgtgtgtgtgcatgtgtgtgtctgcattcatgccttaactcgggttactgcacaactttagttcttgacttagtctgcaccgtcatctagattgtattgtacatctcggtctgaacttcatcctggcaaaaacaaagttgcaggcacaacagtttaagaatgcattcctccagaagagtatctggtcaggttgaccctgagccttctttggacttgatttggaacttagcctggaaagcgaaagtggactgtccaacagaaagatgtcaacaaggaaaagaggagagccaagcgctagcatgccttttgcctctgcatatctgtgcacactgtatgttgttcatgatagcttgtctacaacttgactaggttggagttctggtaatagtggcaatcttgacattcttggtcagagtttagagagatgtaagactttcaattaatgtcttatttactcctttatgttgattagtctttgatacatgtgctgaatcagaaacctaaataaagataattttttaaaatgt

SEQ ID NO: 1632 - DNA, 1530 bp, Homo sapiens
gttgtcactcgactaccaagatggcggcccccgggagctgtgctctatggagctattgcggccgtgggtggtcgcgggcgatgcggggctgccagctcctcgggcttcgtagctcttggcccggggacctactaagtgctcggctcttgtcccaagagaagcgggcagcggaaacgcactttgggtttgagactgtgtcggaagaggagaaggggggcaaagtctatcaggtgtttgaaagtgtggctaagaagtatgatgtgatgaatgatatgatgagtcttggtatccatcgtgtttggaaggatttgctgctctggaagatgcacccgcttcctgggacccagctgcttgatgttgctggaggcacaggtgacattgcattccggttccttaattatgttcagtcccagcatcagagaaaacagaagaggcagttaagggcccaacaaaatttatcctgggaagaaattgccaaagagtaccagaatgaagaagattccttgggcgggtctcgtgtcgtggtgtgtgacatcaacaaggagatgctaaaggttggaaagcagaaagccttggctcaaggatacagagctggacttgcatgggtattaggagatgctgaagaactgccctttgatgatgacaagtttgatatttacaccattgcctttgggatccggaatgtcacacacattgatcaggcactccaggaagctcatcgggtgctgaaaccaggaggacggtttctctgtctggaatttagccaagtgaacaatcccctcatatccaggctttatgatctatatagcttccaggtcatccctgtcctgggagaggtcatcgctggagactggaagtcctatcagtaccttgtagagagtatccgaaggtttccgtctcaggaagagttcaaggacatgatagaagatgcaggctttcacaaggtgacttacgaaagtctaacatcaggcattgtggccattcattctggcttcaaactttaattcctttcctatcatggagcatgaaccagtcatatcctgttgaaagcctggaactgaaggataatctggcaaatgagacagcagcagagcatctcctcttaaggatacgtgccttggactcatgtttgaatcgaacagtctcaaagtggaagaacaaattcttgtcacttttttacagctttctttggagctgcttcagtccatctcccagaggcatttggtctgtatctttgctcaactgctaatttctcttggctgtagggtgtgtggttaaggtacaaccacccctaaagctcagttttgaagtgagtgtatttatagcttctctgctggtgctgccttctagagggatgatagatcatttgaacccaatgacaatttttaaccagaaaatttaattgtacctgaatcaacctttcagcctaggacgaagtctaggcccaagtcagagtattaatgatcatgagaattgtgtgctgaaccagtaaacgagtttaccttttgaaaaaaaaaaaaaaaaaaaaaa

SEQ ID NO: 1633 - DNA, 5472 bp, Homo sapiens
ggggatgtggtgctgccggggccgccactgcagctgctgctgcctgctggttgccgcgtcttcccggaggcgactgctggaagctgcagggaacagctgcggtgctctgccatattgtgtcttccccggccggtccctcgcctcccggccgagctgacgttggttgaagccatggataacagaacccacagatgcagagggctgactgtacaagtctgtcaaaaaaccaaactgctggttggctaataattggtcactgtatgacttatagtacaggtgatattacttctgattctagatgaactgtaagagtaaatgggtccagtaattggaatgactccagataagagagctgaaaccccaggagctgaaaagattgcaggattaagccagatttacaaaatgggaagcttgcctgaagctgttgatgctgccaggccgaaggccactctagtggacagtgagtcagcagatgatgaactcacaaacttgaactggcttcatgaaagcactaatcttctaacaaacttcagcctcggaagtgagggtcttccaattgttagtccattgtatgacatagagggagatgatgtgccatcctttggaccagcttgctaccagaacccagaaaaaaaatcagcgacttcaaagcccccatactcctttagtcttctcatttatatggccattgagcactctccaaataaatgtttgcctgtcaaagaaatttatagctggattctggaccattttccatattttgctactgcaccaacaggctggaagaattctgttcgacataatctgtccctgaataaatgttttcagaaagtggaaagaagccatggcaaggttaatggaaaaggttccttatggtgtgttgatccggaatataaacccaatcttatccaggcactgaagaagcaacctttttcttcagcatcttcacaaaatggttctttatcacctcactatttaagctctgtaatcaagcagaaccaggtgcgaaacctcaaagaatctgatattgatgctgctgctgcaatgatgcttttaaatacttctatagaacaaggaattttagaatgtgagaagcctcttcctcttaaaacagcattgcaaaaaaagaggagttacggcaatgcatttcatcatcccagtgctgtacgattacaagagagtgattctttagccaccagcattgatccaaaagaagatcacaattacagtgcaagtagcatggcagcacagcgttgtgcatccaggtctagcgtgtcttccctgtcttctgtggatgaggtatatgaatttatcccaaagaatagtcacgtgggaagtgatggcagtgaaggatttcacagtgaagaagatacagacgttgattatgaagatgatcctcttggagacagtggctatgcatcacagccttgtgcaaaaatctctgaaaaagggcagtcaggcaaaaagatgcgaaaacagacatgtcaagaaattgatgaggagctcaaagaggcagctggatctctgctccaccttgctggaattcgtacatgtttaggttccctaataagtactgcaaagacacaaaatcaaaagcaacggaaaaaatagaaatacttaaagtgtggcaatactctttcacttaattctttacaagggatatcaaagccataatggacttcattagttttagggtagggaagggatactaattacttatttctttcaaaacatttttggtttttggtttttaaaatttttattaaacaattgctgttaggatcatgcctgatcagaaatacatgatgtgaagtcctaaaagcataatttttgtgataaatgtgtccaagatttgaaaatttttatataagaaaatccccagcctctgtcttaaacttgtgggacaaaaatcctttcttctgttaatatgtcagaatgtaagatttggcaactcgataaatttttttcattttcttttccaatctgtaactatagttactgaaccagctaaaaattttgctgatgtatttttcatatacttctctcctgacacgcaatccggtaacataagattgaaatttttttactttgtcttaatttgtttctaattttttttttgttgtcgtgtgagcaaagacaaacataaattgaaaaacatcctgatgtttagaaagtttcttttggttacgtaggtagagaatacaacaaagagttctaagacttagaaaagacaattttgtggtgtcatttcatccaagaacactcccaattcctattagaatggtagctttgaagtgtttttacttcagagatcctgcatagcatttattggggccttttattctttcccaaagtgctttgcaaacattaagttttagccactagctgcctttgttgagtataagttatccagtgagaggatatagccaattaagtgtgttatggagtacacccattttgacacacttgtaataagagaatctttcatttgcctgccatgtgtactgtattatgagaatcttataatcggaatggagtgaaatgaaacattttgagtactgatggcatgttatcatacataaagtaggtcatttaggaaaaaacttctgtccaagctttgtatgaattaaattcataagtataccaaattaaatcttaatagatttaatgcaattttacagacacaataccttcatgaatttcaaaattcatataaaatttgatcttatgcaatacacctttttgaggaggcagtgtaacaacctatagtgccattgatccatgagaaaaagattttctggtactactccaaaagtgctttgactaagtatcttaactatttgaacagtctgcttatatgagacagtttttcatagtatcatttgtataatttgattagattattcagaaacaataggatgctaaactaattcattgtatcttttttttacaatggtggaagcaactttctgaaagttcagtcttatgctacatcctaagtcatagacaatgaccttgttttcattattctgatagattgtatacatatgtacacatacatatacacatatgcacagtcaaggtcatgatgttgatttgctttcagctgtttctgtgattataaagcattttttaagagacaaattttaacttttaatttttattttggcaaaactgtcaaatgagaaaaatgattttaaaaacttttttttcaattgacaagactttaagtcagggataacagtattaatgttctctgttctgtttccatgttaaatttaatttaacctggatagccacattaatgaattggtgctgtcaaaatatagtaatttttaaatttgttaataatgaaaacccttaagcatgcaggatgaggtatttgggttttttttttagatcgatcacatctacagaaaatggctaaaccaagttaacttttattatagacagtgaataaaacaccaaaaacccaaaaatgctttaaccacagtataaataatagattatacacatcatcttaataactatttttaagttatttaccatagcctctgtatagaccttaggaacagtgtttcagtgatctggcaccagtttattttgttctgctgaaattctgtatcacaaatgtgctacctggtttttgtccattagataattactctttataaggaaaggaaagagaagcagagttagttccagctctaatagggatcttcaaagttattttgtcttgatgtatgtaacagtaattctttacatcttttgatttttctcttcctttttattcactcttcccacgaatttaaatgtttaagttatattcatcactagcaaggatgataaacacttgtgcactgaaagctaacagggagaggttacacaatattttacagtttcttaaacataatttaatgcatcaccttccacttgctaacataccaagtcagttattttcaagggaagaaccttttaaattatggtcctccatttactacttccactgagagtatgctctcattcctcaggtgttttgagaaacatgactaataaccacacaattaagtagagtcattccaagtcctatggcctggaaattgtattccctataatatacaaattttcctgtaataaagtcaacttagaaactccaaggaggttacatgttttccaacatatcctaaaaactgtgatataagctaacatataatttgccttacgtcaaaagaatatgttttgttgcagctgattccagtttataatagatccctagtaaaaagctttgattcaacacaattgttcatcttcacatcccaaacagaatcactgtttcttgaatatatatttttgaagtttttttgtgcaatatattactaaatcagttattattttacttttccaaattcagagaaagaaaacagattacctgaattcatggaaaaggtggatcacctccctttttccaccttcaagcctttcctgtcctcatagccagcatgacttcttttaacttggattcctttgtatatagtaaagtttagtatatatatatttttttctttttgctactttctgaggcattatgtaaagggctcatactagatgttcagttaaatatactttagcacaaagtcaaactagagaatgtgttaaggagggaatgtatatgtcttggtagaccaggaggcctttgccagcaatttaagcaacagatgtgaatacttcacaaagctgtaaagaccattgtcttaaatactacaacaacttaacacccttttgtgaagatcacagcatttatctaagaaactgtgaggctttctggtttacatatatcttacaggtgtttttttgtatttttttttttttttagtttgaaatgtgtaagctttgatttaaaccaagtttacttcagtatgttaatgatgtagtaaaaatatttattgaaaggtgaattcgagtattttaatgttatacctgccattttttttcttaaagcatattctttgcatctaactgccagtgccattgtcaaaacttattttttaaatcgttgtacatttcttattaaactaagtgcttaattttaaagtattatgttgccatcatatagtgtataaaaatgtataattgccaattgattgtaactattatttatttttaaatgaaagtgtaagaatgctttctgattcaacaaatttgttatcaaactgtttccttatcctcttttctgatgtagcataaaaattgtcccggtttgagttataactgccagtagatgaccagtcacaagtgaaccacttctcagttgccaatctttgctcatattaaaaacaacttacaaatacttagtttttgtatctaatctctgattattaaaatgtttataaagtttatttttaccaaagagatgcaattcattatgagaaagtattgcataataaattttgttttataacttttaaaaaaaaa

SEQ ID NO: 1634 - DNA, 12436 bp, Homo sapiens
gtattgatgtcaagctgaaccatcgtaggaagttgaaagccttagaaagaggacttggtaaagtttttggattatcttgaaactctggcaagatggccaagtatggagaacatgaagccagtcctgacaatgggcagaacgaattcagtgatatcattaagtccagatctgatgaacacaatgacgtacagaagaaaacctttaccaaatggataaatgctcgattttcaaagagtgggaaaccacccatcaatgatatgttcacagacctcaaagatggaaggaagctattggatcttctagaaggcctcacaggaacatcactgccaaaggaacgtggttccacaagggtacatgccttaaataacgtcaacagagtgctgcaggttttacatcagaacaatgtggaattagtgaatatagggggaactgacattgtggatggaaatcacaaactgactttggggttactttggagcatcattttgcactggcaggtgaaagatgtcatgaaggatgtcatgtcggacctgcagcagacgaacagtgagaagatcctgctcagctgggtgcgtcagaccaccaggccctacagccaagtcaacgtcctcaacttcaccaccagctggacagatggactcgcctttaatgctgtcctccaccgacataaacctgatctcttcagctgggataaagttgtcaaaatgtcaccaattgagagacttgaacatgccttcagcaaggctcaaacttatttgggaattgaaaagctgttagatcctgaagatgttgccgttcagcttcctgacaagaaatccataattatgtatttaacatctttgtttgaggtgctacctcagcaagtcaccatagacgccatccgtgaggtagagacactcccaaggaaatataaaaaagaatgtgaagaagaggcaattaatatacagagtacagcgcctgaggaggagcatgagagtccccgagctgaaactcccagcactgtcactgaggttgacatggatctggacagctatcagattgcgttggaggaagtgctgacctggttgctttctgctgaggacactttccaggagcaggatgatatttctgatgatgttgaagaagtcaaagaccagtttgcaacccatgaagcttttatgatggaactgactgcacaccagagcagtgtgggcagcgtcctgcaggcaggcaaccaactgataacacaaggaactctgtcagacgaagaagaatttgagattcaggaacagatgaccctgctgaatgctagatgggaggctcttagggtggagagtatggacagacagtcccggctgcacgatgtgctgatggaactgcagaagaagcaactgcagcagctctccgcctggttaacactcacagaggagcgcattcagaagatggaaacttgccccctggatgatgatgtaaaatctctacaaaagctgctagaagaacataaaagtttgcaaagtgatcttgaggctgaacaggtgaaagtaaattcactaactcacatggtggtcattgttgatgaaaacagtggtgagagtgctacagctatcctagaagaccagttacagaaacttggtgagcgctggacagcagtatgccgttggactgaagaacgctggaataggttacaagaaatcaatatattgtggcaggaattattggaagaacagtgcttgttgaaagcttggttaaccgaaaaagaagaggctttaaataaagtccagacaagcaacttcaaagaccaaaaggaactaagtgtcagtgttcgacgtctggctattttgaaggaagacatggaaatgaagcgtcaaacattggatcagctgagtgagattggccaggatgtgggacaattacttgataattccaaggcatctaagaagatcaacagtgactcagaggaactgactcaaagatgggattctttggttcagagactagaagattcctccaaccaggtgactcaggctgtagcaaagctggggatgtctcagattcctcagaaggaccttttggagactgttcgtgtaagagaacaagcaattacaaaaaaatctaagcaggaactgcctcctcctcctcccccaaagaagagacagatccatgtggatattgaagctaagaaaaagtttgatgctataagtgcagagctgttgaactggattttgaaatggaaaactgccattcagaccacagagataaaagagtatatgaagatgcaagacacttccgaaatgaaaaagaagttgaaggcattagaaaaagaacagagagaaagaatccccagagcagatgaattaaaccaaactggacaaatccttgtggagcaaatgggaaaagaaggccttcctactgaagaaataaaaaatgttctggagaaggtttcatcagaatggaagaatgtatctcaacatttggaagatctagaaagaaagattcagctacaggaagatataaatgcttatttcaagcagcttgatgagcttgaaaaggtcatcaagacaaaggaggagtgggtaaaacacacttccatttctgaatcttcccggcagtccttgccaagcttgaaggattcctgtcagcgggaattgacaaatcttcttggccttcaccccaaaattgaaatggctcgtgcaagctgctcggccctgatgtctcagccttctgccccagattttgtccagcggggcttcgatagctttctgggccgctaccaagctgtacaagaggctgtagaggatcgtcaacaacatctagagaatgaactgaagggccaacctggacatgcatatctggaaacattgaaaacactgaaagatgtgctaaatgattcagaaaataaggcccaggtgtctctgaatgtccttaatgatcttgccaaggtggagaaggccctgcaagaaaaaaagacccttgatgaaatccttgagaatcagaaacctgcattacataaacttgcagaagaaacaaaggctctggagaaaaatgttcatcctgatgtagaaaaattatataagcaagaatttgatgatgtgcaaggaaagtggaacaagctaaaggtcttggtttccaaagatctacatttgcttgaggaaattgctctcacactcagagcttttgaggccgattcaacagtcattgagaagtggatggatggcgtgaaagacttcttaatgaaacagcaggctgcccaaggagacgacgcaggtctacagaggcagttagaccagtgctctgcatttgttaatgaaatagaaacaattgaatcatctctgaaaaacatgaaggaaatagagactaatcttcgaagtggtccagttgctggaataaaaacttgggtgcagacaagactaggtgactaccaaactcaactggagaaacttagcaaggagatcgctactcaaaaaagtaggttgtctgaaagtcaagaaaaagctgcgaacctgaagaaagacttggcagagatgcaggaatggatgacccaggccgaggaagaatatttggagcgggattttgagtacaagtcaccagaagagcttgagagtgctgtggaagagatgaagagggcaaaagaggatgtgttgcagaaggaggtgagagtgaagattctcaaggacaacatcaagttattagctgccaaggtgccctctggtggccaggagttgacgtctgagctgaatgttgtgctggagaattaccaacttctttgtaatagaattcgaggaaagtgccacacgctagaggaggtctggtcttgttggattgaactgcttcactatttggatcttgaaactacctggttaaacactttggaagagcggatgaagagcacagaggtcctgcctgagaagacggatgctgtcaacgaagccctggagtctctggaatctgttctgcgccacccggcagataatcgcacccagattcgagagcttggccagactctgattgatggggggatcctggatgatataatcagtgagaaactggaggctttcaacagccgatatgaagatctaagtcacctggcagagagcaagcagatttctttggaaaagcaactccaggtgctgcgggaaactgaccagatgcttcaagtcttgcaagagagcttgggggagctggacaaacagctcaccacatacctgactgacaggatagatgctttccaagttccacaggaagctcagaaaatccaagcagagatctcagcccatgagctaaccctagaggagttgagaagaaatatgcgttctcagcccctgacctccccagagagtaggactgccagaggaggaagtcagatggatgtgctacagaggaaactccgagaggtgtccacaaagttccagcttttccagaagccagctaacttcgagcagcgcatgctggactgcaagcgtgtgctggatggcgtgaaagcagaacttcacgttctggatgtgaaggacgtagaccctgacgtcatacagacgcacctggacaagtgtatgaaactgtataaaactttgagtgaagtcaaacttgaagtggaaactgtgattaaaacaggaagacatattgtccagaaacagcaaacggacaacccaaaagggatggatgagcagctgacttccctgaaggttctttacaatgacctgggcgcacaggtgacagaaggaaaacaggatctggaaagagcatcacagttggcccggaaaatgaagaaagaggctgcttctctctctgaatggctttctgctactgaaactgaattggtacagaagtccacttcagaaggtctgcttggtgacttggatacagaaatttcctgggctaaaaatgttctgaaggatctggaaaagagaaaagctgatttaaataccatcacagagagtagtgctgccctgcaaaacttgattgagggcagtgagcctattttagaagagaggctctgcgtccttaacgctgggtggagccgagttcgtacctggactgaagattggtgcaataccttgatgaaccatcagaaccagctagaaatatttgatgggaacgtggctcacataagtacctggctttatcaagctgaagctctattggatgaaattgaaaagaaaccaacaagtaaacaggaagaaattgtgaagcgtttagtatctgagctggatgatgccaacctccaggttgaaaatgtccgcgatcaagcccttattttgatgaatgcccgtggaagctcaagcagggagcttgtagaaccaaagttagctgagctgaataggaactttgaaaaggtgtctcaacatatcaaaagtgccaaattgctaattgctcaggaaccattataccaatgtttggtcaccactgaaacatttgaaactggtgtgcctttctctgacttggaaaaattagaaaatgacatagaaaatatgttaaaatttgtggaaaaacacttggaatccagtgatgaagatgaaaagatggatgaggagagtgcccagattgaggaagttctacaaagaggagaagaaatgttacatcaacctatggaagataataaaaaagaaaagatccgtttgcaattattacttttgcatactagatacaacaaaattaaggcaatccctattcaacagaggaaaatgggtcaacttgcttctggaattagatcatcacttcttcctacagattatctggttgaaattaacaaaattttactttgcatggatgatgttgaattatcgcttaatgttccagagctcaacactgctatttacgaagacttctcttttcaggaagactctctgaagaatatcaaagaccaactggacaaacttggagagcagattgcagtcattcatgaaaaacagccagatgtcatccttgaagcctctggacctgaagccattcagatcagagatacacttactcagctgaatgcaaaatgggacagaattaatagaatgtacagtgatcggaaaggttgttttgacagggcaatggaagaatggagacagttccattgtgaccttaatgacctcacacagtggataacagaggctgaagaattactggttgatacctgtgctccaggtggcagcctggacttagagaaagccaggatacatcagcaggaacttgaggtgggcatcagcagccaccagcccagttttgcagcactaaaccgaactggggatgggattgtgcagaaactctcccaggcagatggaagcttcttgaaagaaaaactggcaggtttaaaccaacgctgggatgcaattgttgcagaagtgaaggataggcagccaaggctaaaaggagaaagtaagcaggtgatgaagtacaggcatcagctagatgagattatctgttggttaacaaaggctgagcatgctatgcaaaagagatcaaccaccgaattgggagaaaacctgcaagaattaagagacttaactcaagaaatggaagtacatgctgaaaaactcaaatggctgaatagaactgaattggagatgctttcagataaaagtctgagtttacctgaaagggataaaatttcagaaagcttaaggactgtaaatatgacatggaataagatttgcagagaggtgcctaccaccctgaaggaatgcatccaggagcccagttctgtttcacagacaaggattgctgctcatcctaatgtccaaaaggtggtgctagtatcatctgcgtcagatattcctgttcagtctcatcgtacttcggaaatttcaattcctgctgatcttgataaaactataacagaactagccgactggctggtattaatcgaccagatgctgaagtccaacattgtcactgttggggatgtagaagagatcaataagaccgtttcccgaatgaaaattacaaaggctgacttagaacagcgccatcctcagctggattatgtttttacattggcacagaatttgaaaaataaagcttccagttcagatatgagaacagcaattacagaaaaattggaaagggtcaagaaccagtgggatggcacccagcatggcgttgagctaagacagcagcagcttgaggacatgattattgacagtcttcagtgggatgaccatagggaggagactgaagaactgatgagaaaatatgaggctcgactctatattcttcagcaagcccgacgggatccactcaccaaacaaatttctgataaccaaatactgcttcaagaactgggtcctggagatggtatcgtcatggcgttcgataacgtcctgcagaaactcctggaggaatatgggagtgatgacacaaggaatgtgaaagaaaccacagagtacttaaaaacatcatggatcaatctcaaacaaagtattgctgacagacagaacgccttggaggctgagtggaggacggtgcaggcctctcgcagagatctggaaaacttcctgaagtggatccaagaagcagagaccacagtgaatgtgcttgtggatgcctctcatcgggagaatgctcttcaggatagtatcttggccagggaactcaaacagcagatgcaggacatccaggcagaaattgatgcccacaatgacatatttaaaagcattgacggaaacaggcagaagatggtaaaagctttgggaaattctgaagaggctactatgcttcaacatcgactggatgatatgaaccaaagatggaatgacttaaaagcaaaatctgctagcatcagggcccatttggaggccagcgctgagaagtggaacaggttgctgatgtccttagaagaactgatcaaatggctgaatatgaaagatgaagagcttaagaaacaaatgcctattggaggagatgttccagccttacagctccagtatgaccattgtaaggccctgagacgggagttaaaggagaaagaatattctgtcctgaatgctgtcgaccaggcccgagttttcttggctgatcagccaattgaggcccctgaagagccaagaagaaacctacaatcaaaaacagaattaactcctgaggagagagcccaaaagattgccaaagccatgcgcaaacagtcttctgaagtcaaagaaaaatgggaaagtctaaatgctgtaactagcaattggcaaaagcaagtggacaaggcattggagaaactcagagacctgcagggagctatggatgacctggacgctgacatgaaggaggcagagtccgtgcggaatggctggaagcccgtgggagacttactcattgactcgctgcaggatcacattgaaaaaatcatggcatttagagaagaaattgcaccaatcaactttaaagttaaaacggtgaatgatttatccagtcagctgtctccacttgacctgcatccctctctaaagatgtctcgccagctagatgaccttaatatgcgatggaaacttttacaggtttctgtggatgatcgccttaaacagcttcaggaagcccacagagattttggaccatcctctcagcattttctctctacgtcagtccagctgccgtggcaaagatccatttcacataataaagtgccctattacatcaaccatcaaacacagaccacctgttgggaccatcctaaaatgaccgaactctttcaatcccttgctgacctgaataatgtacgtttttctgcctaccgtacagcaatcaaaatccgaagactacaaaaagcactatgtttggatctcttagagttgagtacaacaaatgaaattttcaaacagcacaagttgaaccaaaatgaccagctcctcagtgttccagatgtcatcaactgtctgacaacaacttatgatggacttgagcaaatgcataaggacctggtcaacgttccactctgtgttgatatgtgtctcaattggttgctcaatgtctatgacacgggtcgaactggaaaaattagagtgcagagtctgaagattggattaatgtctctctccaaaggtctcttggaagaaaaatacagatatctctttaaggaagttgcagggccaacagaaatgtgtgaccagaggcagctgggcctgttacttcatgatgccatccagatcccccggcagctaggtgaagtagcagcttttggaggcagtaatattgagcctagtgttcgcagctgcttccaacagaataacaataaaccagaaataagtgtgaaagagtttatagattggatgcatttggaaccacagtccatggtttggctcccagttttacatcgagtggcagcagcggagactgcaaaacatcaggccaaatgcaacatctgtaaagaatgtccaattgtcgggttcaggtatagaagccttaagcattttaactatgatgtctgccagagttgtttcttttcgggtcgaacagcaaaaggtcacaaattacattacccaatggtggaatattgtatacctacaacatctggggaagatgtacgagacttcacaaaggtacttaagaacaagttcaggtcgaagaagtactttgccaaacaccctcgacttggttacctgcctgtccagacagttcttgaaggtgacaacttagagactcctatcacactcatcagtatgtggccagagcactatgacccctcacaatctcctcaactgtttcatgatgacacccattcaagaatagaacaatatgccacacgactggcccagatggaaaggactaatgggtcttttctcactgatagcagctccaccacaggaagtgtggaagacgagcacgccctcatccagcagtattgccaaacactcggaggagagtccccagtgagccagccgcagagcccagctcagatcctgaagtcagtagagagggaagaacgtggagaactggagaggatcattgctgacctggaggaagaacaaagaaatctacaggtggagtatgagcagctgaaggaccagcacctccgaagggggctccctgtcggttcaccgccagagtcgattatatctccccatcacacgtctgaggattcagaacttatagcagaagcaaaactcctcaggcagcacaaaggtcggctggaggctaggatgcagattttagaagatcacaataaacagctggagtctcagctccaccgcctccgacagctgctggagcagcctgaatctgattcccgaatcaatggtgtttccccatgggcttctcctcagcattctgcactgagctactcgcttgatccagatgcctccggcccacagttccaccaggcagcgggagaggacctgctggccccaccgcacgacaccagcacggatctcacggaggtcatggagcagattcacagcacgtttccatcttgctgcccaaatgttcccagcaggccacaggcaatgtgaagtattcatccggccaaccaatgtttcctgacgtacagtgttgcccttttcagcaaatgccaattccaagttccattaaatcagaagctccatggctccttggcccacgatgttgagtgctgactgtgtgttctactgaaagagtaaaacactgactatccaaagagaaatggatattttgtttttataataaccatatattattgttttcttcttccctttctatgcaagtgtaaattaatgaacagagaggtatttggaaatggtaatacatttgtcacggatttgtataatgtatacagcattgggaaagtgggtgggggctttctaatatgataccgtctttttaataactatgacaaagcttacataagaattagaagaccactttacatttttacattccttctgctgttcatattaaccttgcacaattacttcattttttctttgactcttttaccacaatgttttggttatttataatttatcagccatatgtttatcagccatataaccaactagatcccaaatagatccatgtatttgtttccgtgatttggccacattaataaattcataaatttcaatcaaatatcttatatatacacacatatggtttaagctacagccctgtgtatgccgtttaactttatttgacgttgcccacttacttctttgctgaccacttggataaccgtaataaaaatcctataagcctaaatggcatttcttttgggatatttttcctgcattttattccctttttatataagtaggaattaattatttattttatgtcttaatctatttgataaagaagactacattataataatctcaaagatcatattaccaaaggttgcccacttgagcatattttcattttgacacagaaacaaaatttagtacaacctttcctagttcccatgtcttgattttcatcattacatgcacagcagacctttacctattgtgataccagaacacatcattgtctttggttcccttcaaagagaattttattgttgttttgtattttcaagtccttaatagttcttgaaactcctagttgttttcttgttgaaagcagacacacatttagtgcacggcttattttacctttcgggtgaaagatcagatgtttttatacccttcacttgatcaatatatttggaaagaatgtttatcaaaagtctatgtcactgcttctacagaagaatgaaattaatgcttaggtgatggtacctccacctacatctttttgagtgcattcaattatgtattttggtttagcttctgatttaacatttaattgattcagtttaaacatgttacttaattagcaaatgtagaggaaccaaaaaaaggtgaaaataatatgttttgattcaaacctaaagacataaaaacataaagacattttaactttgggttctctttagctgggatctggccagaaggaggcttaaagttagaaattgctattattttagaataggttgggtgggttggggggcaagggtgtctatttgcagcagagatattttgaaaagaagaaaattgttttatataaaaaggaaagccatgaccacctttctacctcagatccatcttcatccattgcattggaaactgctttatgctgctgcagtctgcaaagtctagagcttttatcaggccatgtcatacccaagaaagcacctatttaaagaaaaaacaattccctgagctctcaactccaagttgtagatttggtgtcttccttgttcttactttaaaaagtcatgtgttaattttttttctgcctgtatttgtatgcaaaatgtcctctatctgctattaaagaaaagctacgtaaaacactacattgtaaccttctaagtaataataaataaaaagaaatatattgcagtaacaatgggaagtaagtatgtagttcttttgaaatatgtggtaaagaactaatcacagactatcatctaatctggttacatattgtatttttcatcctgaataaaagtaattttaacacaaaaaaa

SEQ ID NO: 1635 - DNA, 1919 bp, Homo sapiens
ttggtggaaggtgggtgtgtagtcgtggtactttacgcctcggtgtttagggaggagcctaaggtaaggagtcagaaacggggagtaaccgagctgcggcttttatataaggtcagtggtaggtaaggaaggggccttaacctctgctggtgaccagaagcctgcatttctgcattctgcttaattccctttccttagatttgaaagaagccaacactaaaccacaaatatacaacaaggccattttctcaaacgagagtcagcctttaacgaaatgaccatggttgacacagagatgccattctggcccaccaactttgggatcagctccgtggatctctccgtaatggaagaccactcccactcctttgatatcaagcccttcactactgttgacttctccagcatttctactccacattacgaagacattccattcacaagaacagatccagtggttgcagattacaagtatgacctgaaacttcaagagtaccaaagtgcaatcaaagtggagcctgcatctccaccttattattctgagaagactcagctctacaataagcctcatgaagagccttccaactccctcatggcaattgaatgtcgtgtctgtggagataaagcttctggatttcactatggagttcatgcttgtgaaggatgcaagggtttcttccggagaacaatcagattgaagcttatctatgacagatgtgatcttaactgtcggatccacaaaaaaagtagaaataaatgtcagtactgtcggtttcagaaatgccttgcagtggggatgtctcataatgccatcaggtttgggcggatgccacaggccgagaaggagaagctgttggcggagatctccagtgatatcgaccagctgaatccagagtccgctgacctccgggccctggcaaaacatttgtatgactcatacataaagtccttcccgctgaccaaagcaaaggcgagggcgatcttgacaggaaagacaacagacaaatcaccattcgttatctatgacatgaattccttaatgatgggagaagataaaatcaagttcaaacacatcacccccctgcaggagcagagcaaagaggtggccatccgcatctttcagggctgccagtttcgctccgtggaggctgtgcaggagatcacagagtatgccaaaagcattcctggttttgtaaatcttgacttgaacgaccaagtaactctcctcaaatatggagtccacgagatcatttacacaatgctggcctccttgatgaataaagatggggttctcatatccgagggccaaggcttcatgacaagggagtttctaaagagcctgcgaaagccttttggtgactttatggagcccaagtttgagtttgctgtgaagttcaatgcactggaattagatgacagcgacttggcaatatttattgctgtcattattctcagtggagaccgcccaggtttgctgaatgtgaagcccattgaagacattcaagacaacctgctacaagccctggagctccagctgaagctgaaccaccctgagtcctcacagctgtttgccaagctgctccagaaaatgacagacctcagacagattgtcacggaacacgtgcagctactgcaggtgatcaagaagacggagacagacatgagtcttcacccgctcctgcaggagatctacaaggacttgtactagcagagagtcctgagccactgccaacatttcccttcttccagttgcactattctgagggaaaatctgacacctaagaaatttactgtgaaaaagcattttaaaaagaaaaggttttagaatatgatctattttatgcatattgtttataaagacacatttacaatttacttttaatattaaaaattaccatattatgaaattgctgatagta

SEQ ID NO: 1636 - DNA, 3129 bp, Homo sapiens
agaattatggcgacctccgcgacgtcgccgcacgcgcctggttttccagctgagggtagatgcggttactatgtggaaaagaagaaacggttctgcaggatggtggtggccgcagggaaaagattttgtggtgaacacgctggagccatggaggaagaagatgctcggaaaagaatcctgtgtcctttagatccaaaacacacagtatatgaagatcaactagcaaagcatttgaaaaaatgtaactcaagagagaaaccaaaacctgatttctatattcaagatattaatgcaggcttaagagatgaaacagaaatacctgaacaattagttccaatttcttctctatctgaagagcagttggaaaagttaattaagaaattgagaaaagcaagtgaaggcttgaattctacacttaaagatcatattatgtcccatccagcattacacgatgcacttaatgaccctaaaaatggcgattctgcaaccaagcacctgaaacagcaggcttctattttaggtaacattgaaaatttaaagttacttggtccaagaagatgctttgttgagtttggagcgggaaagggaaaattatctcattgggttgatattgccttaaaagatgctgaaaaagttcacttcatcctagtggaaaaggtgaccacaagattcaaggtggatggaaaacacagaaagaaaaattcagtgtttgaaagacttcaaattgatattcaacacttgtgtttgaacaagattcctgtgctaagagaagaaaaactacctgtggtaggaattggaaagcatctgtgtggtatggcaacagatcttgcattacgatgtttggttgaaacctatgctgccagttttgaggaaaggaatgaagaacctttagccaaacgcataaagaatgataaaacagaaaaagaaatttacactttggccaaggaaggaaatgaaaaaaatgtcccagagaagtggaaccctgtggctggcattgttattgcactctgttgtcaccacaggtgtgattggagacattatgtgggcaaagaatatttcagggctctaggccttggagcagtggaattccattatttccagcgaatgagtagttgggcaacttgtgggatgcggaaaacatctttggaaacctcaaatagtaccacaaagaggcaagataatcagaatgatgatagtgaagagcatgatgatggaggatacagaatcacagatgatggcgctgattgtttgcctgggcttcttagtgttgaagaaaagaagaaaatagggcatctttgtaaattgctgattgaccaaggtcgaatccagtatttgcagcagaagggattcagtcctgctttgcagtactatacagaccctctggtgtctttggaaaatgttttgttaactgctttaccaaatcattcttcatcaccagaaacaactgcttaatggaaaagaaatttgagcatcatctgtcttccaccaaaaaaaattttttaattatatttttatatcaaaaaaatatatactttaaatagcaaataatatgaactttaaaaaatgctgtggcctcattaaactttggtaatagcttttctttttacttcagaaatccaaacattagagaattcaccaaagtaatcctctttagaagggcatcttgaattatattatccatccgtatttatggagattggtaaagtagttgaaccgttgacttggtgatctgaaacatacataacatgtcaacacataattagcgtatttctgtttgtattaattttggaaatttatcttcctttgattttatttaatattttttatttcttaagttcaagaggtagtgattgattgtaacaagggccaatctgagaatttgacttatatgtggacatttttccctacagatctggaaagcacaattgtgattttctcaaatgcagacaattcagagatattcacaattaataaacacaattaattaatgaagtcaccttcaaatttccagagccatacatgtatatattgtcagaatctgtccatgacaaacacaaaactgaagagctgttttcaaagaaaaaagattatttcacttaattattttgttggataattgtctagttagaacttccaaaaagatacttacaaacataattcacaaatttgaaataatttctgaagttgattagctatctcatatcttttatcaggtcattttttatatatgtaggcacaaacaataagtatgttctcttctgtttgggaaaataatttggaataaaatagaaattagataatgaaaccaaaaaccttctcaaatttaggccttatttaactcatgactggtttctatgcacaagaaaatactaaaccaaatatatggtaggactgttattctcttctgcatcttatccctattttgtttctgcctttatttgtaaaaattgtcttaattgatggtacatttgccaagacaaaggttcagaattactaattttagatattatgatattctgaaataactatttttatcctgtagttctatgattatatgatttgtaaataagaagcctaaccaatttaaaattcctgactttagtctcatatatcttgtcagactgtctcggttcaaattccaaacctaccatcttcagttgtgcgaccttgggcatgctacctaatctctttgtgcctcaatttcctccttttaaaatggggatgatgatgataacaataatacctacctcacaaggttgttgtgagcatcaaatgagataacacaagtaaaatgcatagaacagttccaagcacagagtaattcaataaatattaactagtaatagtagtggtagtaactcgtgaatctttttaataacataataggctttgattttattatctctttaagttgttaacttttttcccttgttataagttttatgtcaagtaaggtagtttgtttaagttagttacccatgtccccaatcaagggaacctaaatgaagatatatcattaaataattaacctttttttattgtgtcaagcaatactaatttgtgtcataaaatttgttttgcatcattcaacaatttatgcccagaaataaacaatattctacaacaggc

SEQ ID NO: 1637 - DNA, 862 bp, Homo sapiens
gtgcgcactggcgtgcgagactcggcgggcgctgttgagggagtcgggccgcgactgtggtcgtttttataccttcccgcgcggacgccggcgctgccaacggaagggcggagacggagtttcgtcatgttggccaggcccatttgagatctttgaagatatcctcaacgtgaggctctgctgccatgaaggtgaagattaagtgctggaacggcgtggccacttggctctgggtggccaacgatgagaactgtggcatctgcaggatggcatttaacggatgctgccctgactgcaaggtgcccggcgacgactgcccgctggtgtggggccagtgctcccactgcttccacatgcattgcatcctcaagtggctgcacgcacagcaggtgcagcagcactgccccatgtgccgccaggaatggaagttcaaggagtgaggcccgacctggctctcgctggaggggcatcctgagactccttcctcatgctggcgccgatggctgctggggacagcgcccctgagctgcaacaaggtggaaacaagggctggagctgcgtttgttttgccatcactatgttgacacttttatccaataagtgaaaactcattaaactactcaaatcttgctggaggcctctgggtgcctgtgttctcggcatatagatgtggtctcggtgtgttttgatatgaaaactctcatgaataaacatctccgtgaaacgccaaggccctcgtcaaaccctgagtcatgactgggaggagaaggagcaggatcagacggtagagcctggggcatgctcttcaggcatgctcttgcctgctggattgccggcggcggccctgggaccctccctcagg

SEQ ID NO: 1638 - DNA, 2167 bp, Homo sapiens
ccccgcctcgtggtgccggctggttcttcgcgctcgcccgacttcccagcggccccgtgcggcccgggcatgcccagtgcgggcgcagcggccccggccctggaagcgccccggcggagctggcctgcggtgggctaggggcagggccggagccgcggcggcggagctgtggatccttcatgatgagagatttggggacacttctctctcctgtgtgtagttgatagtttggtggtgaagagatggctgacagtgtcaaaacctttctccaggaccttgccagaggaatcaaagactccatctggggtatttgtaccatctcaaagctagatgctcgaatccagcaaaagagagaggagcagcgtcgaagaagggcaagtagtgtcttggcacagagaagagcccagagtatagagcggaagcaagagagtgagccacgtattgttagtagaattttccagtgttgtgcttggaatggtggagtgttctggttcagtctcctcttgttttatcgagtatttattcctgtgcttcagtcggtaacagcccgaattatcggtgacccatcactacatggagatgtttggtcgtggctggaattcttcctcacgtcaattttcagtgctctttgggtgctccccttgtttgtgcttagcaaagtggtgaatgccatttggtttcaggatatagctgacctggcatttgaggtatcagggaggaagcctcacccattccctagtgtcagcaaaataattgctgacatgctcttcaaccttttgctgcaggctcttttcctcattcagggaatgtttgtgagtctctttcccatccatcttgtcggtcagctggttagtctcctgcatatgtcccttctctactcactgtactgctttgaatatcgttggttcaataaagtggctgccttttctctatcctctttcctttattcattatcagcgccaatgaagcaaagacccctggcaaagcatatctcttccagttgcgcctcttctccttggtggtcttcttaagcaacagactcttccacaagacagtctacctgcagtcggccctgagcagctctacttctgcagagaagttcccttcaccgcatccgtcgcctgccaaactgaaggctactgcaggtcactgagttgcctgccatccaaaggggatgggcgggattggaagaagctgtggcagctcttttccctgttcacctcccgcctgccagggaaggcaggacccgctctgccaagggccctctgcgtattcccttctctctgaggaattgaaatttttgtctctggtgcacgtaaggcagaatgttccctgacaccagtgtgtggatttttaacatcaccgtgagtctgaaaggaccacaggtttttctgcagctattttctagcatttgccagtccctgtgcctggactgattggaacactttgtttttctccctgtgccatttacccttccacctttccatcctgccttctaccacccttggatgaatggattttgtaattctagctgttgtattttgtgaatttgttaattttgttgtttttctgtgaaacacatacattggatatgggaggtaaaggagtgtcccagttgctcctggtcactccctttatagccattactgtcttgtttcttgtaactcaggttaggttttggtctctcttgctccactgcaaaaaaaaaaaaaaaaaaaaaaaaaaaaaaaaagcctgaagagatgagataggaggaaagacctcacagccagatctgctgggttttgaggagtgattttctttcttccccttgaaggggaaaaagctattttcattggtacatttaaagtcccccaactatggggaggtaccaattctggacaagtgccactacaacaacactaaacctgaacttttcaactccgttggtggtgggaggcagcgggcagaaatttactgttggccactgccaggtctatttcatatttcaaaggaatattgggtgctgcatataggaactgaaggggtcaatgtattaaacctgtgattggttgttttcctgtcattttgagagactaaatgtggggggcagatgtcaaaatacctgtacaattttaaaatgtcacaattaaacatgagctggtttcccaaaaaaaaaaaaaaaaaa

SEQ ID NO: 1639 - DNA, 815 bp, Homo sapiens
gcggcgttgtagttaagctcgtgtaacggcggcggtgtcggcagctgctgtagcgaagagagtttggcgcgatgtctcacaccattttgctggtacagcctaccaagaggccagaaggcagaacttatgctgactacgaatctgtgaatgaatgcatggaaggtgtttgtaaaatgtatgaagaacatctgaaaagaatgaatcccaacagtccctctatcacatatgacatcagtcagttgtttgatttcatcgatgatctggcagacctcagctgcctggtttaccgagctgatacccagacataccagccttataacaaagactggattaaagagaagatctacgtgctccttcgtcggcaggcccaacaggctgggaaataattgtgttggaagcactgggggggttggggtgggcttggaacacaggtgtgtacagcgtgctgtagtggaagttttgtatcatagtaatcctgtttccactttgttatactctagccaagattgactgtattagatgaaatgtgaggatcttgttcaatcggaaacccccgttacctcctctttttctttctctttcttttttttttttttacttaaacatttttatgatgatttagatggaagttgttcttcgtcacttaatgttggttccagtccttcaactgttcatatctactttataacattcacatactaacccttcttcaagatggggtggggggtggaaatgcagtttagccatgtcctcaagataaagtcttggtaaaaataaataaatgtcctttagttataaaaaaaaaaaaaaaaaaa

SEQ ID NO: 1640 - DNA, 5639 bp, Homo sapiens
gttgcgcgcgagccacctcccctgctggcgcttcctgtcgctaccgctgcggcccagggcccgcgggagcccagggcggtgccgggtgagacaaggccggggtttggctcggattcaccgcgaggtatctaggctgccatgatgccagggccaagacctcggaagggccctcaggccagaggccaaggggtggccgctgccaagcagatggggctctttatggagtttggccctgaggacatgctgctgggcatggatgaggctgaagatgatgaggacctggaggctgagctgctggctctcacaggggaagcacaaaccacaggcaagaagccagcacccaaggggcaggcccccctgcccatggcccacatcgagaagttggcggcagactgtatgcgggatgtggaggaggaggaggaggaggaagggctggaggaagatgcagagctgctgacggagctgcaggaggtcttaggtgtggacgaggagactgagcccctggatggtgatgaggtagctgacccaggcggctctgaggaggagaacggcctagaagacactgaacctccagtgcagacagccgtcctgacagcttcagccccagcagctcaggccggagcatctcaggggctacacgctttgctggaggaacggattcacaactaccgagaggctgcggccagtgccaaggaggcaggcgaagcagccaaagccaggcgctgcgagcgcggcctgaagaccttggagtcgcagctagcctctgtgaggagaggcagaaagatcaatgaggatgagatcccacctccagtggccttaggaaagcggcccctggccccccaggaaccagccaacaggagccctgagacagaccctccagctccccctgccttggagtcagacaacccctcccaacctgagaccagcctccctggcatttctgcccagcccgtttcagacttagacccagacccgcgggccctgctgtcatcccgacagagagagtacaaagtggctgccctcagtgccaagcgggctggagagctagaccgtgcccgagagctcatgaggattgggaagagattcggtgctgtcctggaggccctggagaaggggcagcccgtggatctgagtgccatgcccccggcacctgaggatctgaagccccagcaggcttctcaggctcccacagcaccctcagtcattcccccagccgtggagcgagtgcagccagtgatggcccctgacgtcccagcaaccccagtggcccctacagagtcacagacagtgctggatgccctgcagcagaggctgaacaagtaccgcgaggcgggcatccaggcccggagtggtggggacgagcgcaaggctcggatgcatgagcgcattgccaagcaatatcaagatgctattcgagcacaccgagcaggacggaaagtcaactttgctgaattgcctgttcctccaggatttccccccatccctggcctggagtccactatgggtgttgaggaggacgcagtggcagcgacattggcagctgcagagaaactggcctctgcagaggattcagccccggctgataaagacgaggacgagcctcctgggcacctgcagggtgagcccccagcacaggccccagtggccaagaaacctgcacggcccacagtcccttcatcccagcgcctgcctgagcccagggcctcaagttctaaggagtcaccgagtccatctgtgcgggagcagctggcactgctggaggcacggaaactgcagtatcagcgggcagccctgcaggccaagcgcagccaggacctggagcaggccaaagcctatctgcgggtagccaaatggcttgaggctcagatcatccaggcccgatctggcagacctgttgatctgtccaaggtgccttcgcccttgacggatgaggagggtgacttcatcctcatccaccatgaggacctgcgactctcccagaaggcggaggaggtgtatgcccagctgcaaaaaatgcttctggagcaacaagagaagtgcctgctgttctccaagcagttcatgcaccagggcaacgtggctgagaccacccgatttgagaagcttgctcaggaccgcaagaaacagctggagatcctgcagctggcccaggctcagggcctcgaccctcccacccaccactttgagttgaagacattccagactgtgaggatcttctcagaactcaacagcacagaaatgcatctgatcattgtccggggaatgaacctcccagcccctccaggggtgactcccgatgacctggatgcttttgtgcggtttgagtttcactaccctaactcggaccaggctcaaaaaagcaaaacagctgtggtgaagaacacaaactctccagaatttgatcaactcttcaaactaaacatcaaccgaaaccaccggggcttcaagagggtgatccagagcaaaggcatcaagtttgagatcttccacaaagggtccttcttcagaagcgacaagctggttggcacagcacacctgaaactggagcggctggagaatgagtgtgagatcagagaaattgtggaggtcctggatggaaggaagcccaccggggggaagctggaggtgaaggtgaggctgcgggagcctctgagtggccaggatgtgcagatggtcactgagaactggctggttctggagcccaggggcttgtgaggtgggcagctctctgggccttcagaacctttgccccctccttttactcaactaactactcaactcatatctggagagaaaacctaggagtttctcatctatgagaaagacctaccatgctgggtagggcttatgggctgagtttctgatgttcctcagtagaactgggaagagaaggtaaccttccaaggtttaactatctatctatctatctatcttcaggaaaccctttctaaaatctttgtgttttcactgcagtttagactgacttcttgtgctttgcacccctgtgtagccgatggccagcaccaggagaggagtcaggccgcgactgtgcaggagatgactttcccagctttgctggcttcagaagcctttgtacataagagatgctgctacccaagcaccaaagacctgttaagcatgtgcactactgaccacgactctggtctttcctgttgttggcccctctggggctctacagaaacaggctgggttccaggagcccatctccccgctgtctccccctgccccgagtctggaagagggcaaggacacttccattcctctgtaccatggagtcctgcagccccttaacccctgcgtggcaactgtgtacagcttacccctgcctccagttgcaccacttctagatgtgcctttaaaagatctaactatgggatgggagaacttgagggtgatcgggaacctcccctgctgagggtggtgtcagggttccgtgactccagtgggccagtggtagcctgtcccagacaactccgtcaccccagctctgcctgtgcctttatccctgacagctgctgcactagccttcctgcttccctaaggacttagtggagggggaaagttgtttttggtactacttggtgggaagtaaggggaaggttggatcttgggtttggtctacccacccaagagaaaagactgttaactggaagaaaaaatatatatataaaattttatgtagacacgtttatttatctaggaaactaagtctaactcattgtagggattttatactcaactatacagagtatccaccaaagtcctaatctaaagtcctgctccctgtcactttttaaaagccagggtagcagtaacatgacaaacggctgctgtggcttcctcttgagagaggacagggaaagcctttcctcttcggctggttatgtggggaacttccttagtttttttccacaagaaattctcctttggctttgtttttctgaatggatggagactatgaaggggtttgtagttgtaagagatttaatattcaaaactgaaatattctgcatttcttagaaataccccatcttcccccaccccctttttgaattattaattcaagatcaacaaagcattcctcaagatcacttttaaaaaaggttagaagtgaagcaaatacattcagcttactgatcactatagtattgcataagcacagctcaagaactgagctttgtatgtgtccttttgggggataacagggctggaccatgcttccctgcccttaaacgcagagcttttagtgggtcacagagcgggaactacacacaagtgacttttttccccatgagccctctggccgattttttttttttttttttttttgagacagagtagctctctgccggccaggctggagtgcagtggcatgatctcagctcgctgcaacccccacctcccaggttcaagcgattctcctgtgtcagtctcctgagtagctgggattgcaggcgcccaccactatgcccagctaatttttttctttttagtggagacggtgtttcaccatgttggtcaggctggtctcgaactcctgacctcatgatccacccacctcagcctcccaaagtgctgggattacaggtgtgagccaccgcacccggctggccaatcttatcagaagtgagctaccaaaacttccacagatgtgagatttaacacttaattgcagtcacgtgtatgcaacacagcaataatctagaatgaaaaggagggtgattagccttcataagatgacctatagagcaaagaaaggtgactggaagggttcctaacccaacctactccccttagggtgtgtatccaacccagtgcttcctaagagggttacggaccactgtggttatcctctaaagttccagccagctctaggagtttctaaattcaggcctctgttggaaatggcctatttcgatagatagaaagttttctatagctctaaaggtttctcctttgcaacccattcaatttcagtctgctgctttgctctttcaaaacagaacctccaggctgacgaggcaagacaaagcctcccaccagacttggagattgaagttcttaaaaggcctttgttgtagccaaaggcatgcatgcgtcactggtagtaggaggagcctgtcccagcttcatcttgtcctgagatttatccacatacaggaaacaggcgggacacagtggctcacgcctgtaatcccaccactttggaaagctgaggcaggtggatcacctgaggtcaggaattcgagaccagcctggccaacatggtgaaaccccgtctccactaaaaacaaaaacaattagctgggcatggtggccggcgcctgtaatcccagctactagggaggctgagacacacgaatcccttgagcccaggaagcagaggttgcagtgagcctcgattgtaccactgcactccagcctgggcgacagagcaagactctgtctcaaaacaaacacaaatacagtatccaaacattggagattagtgactcacctgcagttgggagccagctacaacccaaatcattttaaaattttcaattctttgatctcatgcaatgcacactttcttctgaattagcaaactgaataaactacagaaattttttagaatc

SEQ ID NO: 1641 - DNA, 4309 bp, Homo sapiens
acgtgcttaggagccatattgtcgctagtggccgctggggctgggaggggtgtgctagagaggcgcagcttctctgggcgtggtttttatcctgggggaaggatcggtggaatgtgaggggaggtggaggagatggcggcgacggcccgggaagatggcgccagcggtcaagagcgaggtcagcggggctgcgagcactatgacagaggatgtctcctaaaggcaccttgctgtgacaagctttatacttgccgcttgtgtcatgataacaatgaagatcatcaactagatcgctttaaagtgaaggaagtgcagtgcataaactgtgaaaaaattcaacatgcccaacagacttgtgaagaatgtagcacattgtttggagaatattattgcgatatatgccatttgtttgacaaagataagaagcagtatcactgtgaaaactgtggaatttgtaggattggtccaaaggaagattttttccattgtttgaaatgtaacttatgcctagctatgaatcttcaaggaagacacaagtgtattgaaaatgtgtcccgacagaattgtccaatatgtttggaggacattcacacatcccgtgttgttgctcatgtcttgccatgtggacatcttttacatagaggctacagatgtccattatgtatgcactctgctttagatatgaccaggtattggagacagctggatgatgaagtagcacagactcctatgccatcagaatatcagaacatgactgtggatattctctgcaatgactgtaatggacgatccactgttcagtttcatatattaggcatgaaatgtaagatttgtgaatcctataatactgctcaagctggaggacgtagaatttcactggatcagcaatgacgagcctacacagtactggagaacttggcattttctgatatagaaaaaggctttccttggtatcgtgttatcatgtgtcgtcatctatgcattagagttgatgtgttttgtactagtgtcacagcataaaatcatattacaagtacgtaaggattcagggtctcttgatagacttatcatagctctatattgaatgaaagccactgtgcttgtgttttgattggaaattcctttagtgtcagttttttggaagccaatgatgtttgccactgatacattcatagaagtgtattatattttcatgaagctttgctttaagtgacactacgcgtgcagttcatttctagttcttgatagaactgcacttaattttcagtagtagtcttgactttttaagggctgtgttatattaagttctcccttactgttaaaacctaattaaatatgctttagaattttctaagacagtcctctggatcctctaaatgtgaattttgatgtaataactgctaataaaattatattgaaactgttttatagaaagttttttccaaagttttctatgtttggctcaattagggcagtatcatcagttctataatgtaaaagaaattttctttcttttgaggtattccataaaagtagttgggaaaattattatgtaaaataataagactcttccaaagccttaataaaaacatcaacattgaaaacagttttttttaggttgcccaaaattatttcttcaaagagtcattcattccttcatttagcaagtatttattgagcaactgctatgtggcagatatgtttctagatgctgtagagacaacagtgaacaataaagataaaagtccttgtcctcacagcagtacattctattgttcatcatatttgatcaatgtactcatttttctttatgcaaggagtggatgtcttattgtaaatgaatagaatatttcttccctaagcgtgtgaaaataggggatggatgagtgggaagggcatgggatattcctggcaagatctctgatttcataatacttttttgggctcatgtagtggaattaaatatacctcttacttcaggaacaaagttaacaaatatgtttgatgatccagccgactttgacactgttatctccgtaatagctttaccattaggctaggatgtaaaatgtacatttatcagttgataagtacctattgagcaccagttgtatttccaactttgagctatttgaatcttctttgaataaggaagttagccttttaactagaaagcctaagagttctggcacatttatttcttcttttgttgaaatttattcacctagataaaggcagcagtttgggactcagatctttattttatcccaccttcttgtcttctgtattccactcttcttatgttctttcccttcatctgtttccttggcctggccagagcagcagtgctgatcttcatttgggaaaggatgttcctgggtattaccaattagtatacagataagtaaagactagttttccagatctaatacttttttttgaagtggttttgctctgtcatttaggctagagtgtagtgaagtgatcgtagctcactgcagccttgacttcctgggctgaactgatccttccacctcagcctcctgagtagctgggactacaggtgtgtgccaccatgcccagctaatttttaattgttttgtagaaacaaagtccaggctggtcttgaactcctgggctcaagcatttctcctacctcggccttccaagggctaggattacaggcatgagccactgtgcttggtccagatgtattactttttatgtttggtattattctgccaaaccaatcatgttattgtttttaatcattgaatcattggatctttaaataggagtgagtatataataataaggctcttctgttttcaacatctgtgctgggtcatgcattagcattaattactacaatgattctgtggggtaagtgttgtcctcatagacaagaaagctgaggtttagaggttaaaatgacacattgggggtaaataacagacactatatgttggagttgggaatcagatccaagtttgactccaaacccacttttaccacattgcttttgatctaaacttctattttgctaaaatacccctcacagctagtcatccatatcattgaagcgctcatgatttgatagattaacctttcatttttttaggtgactctagttagaaagtcttatttcacaatctgattgtttctttaacttaggatccaaacatgtccaaaataatgcagagtacatatgcaatcactcgtttatgctgtctagtcatgcacttaaagcaattttcaaatgtactcaaagtctctaggcttcggtacccagggttgcttcaagtatttgttcatgacacgtcaactcgatgattaaaatccttcaacacttctcattcacaataagaataaaatctacatcccttaccattcagtatgcaaaacttaaaatacataactttacccttaaatattttttctttctctgacttcataagtataggttatacctctataagaaagaaggtaaaaaactctcaacaatcccttctttcagagagaactactgttaacattttaacagacaacttcattcttttcctattcttttttataatgcttacaggaatgttaaatacttagacagatcttaagtacactagaattatctgtccctgaaataagttaggttgccctgccgcagaatttgtatctatagtttatttggattatttttgaaaaaagtaaaataacaatacccttacgaattttttggtgcatagcatctcagcttcttttatcattaaagatgtatgtataaaaaaaaaatgagtgtatatcaagttgttcatttcttagtttctggggtcttcttaaccagtacatagaactctttatgaattaactttagcttatgttggaagtagtagtttgtttatagtgtcatggattttaaaatcaaactcagtttttatttcttcactaaaacctattttcatatgatatacatgttaaatttcccttttattttggtcatgcatcaaaataaatttactaagtactaaagagccaacattattttataagtgcctggcaataggtattcactagttgaatagtttaatttgaaatgaattaattttaaatgggagttgttcaaaactatgccactttttcttttgtcctttgtgttattaaaatttaattgataattgtgtatattatatatatggagtacaatgtgatgttttgatatatgtttacagtgtagaatgattaaatcaatgtaataaatttattgcctcataccattttttgtggtaaaaaaaccaaaaaaaaaaaaaaaaaa

SEQ ID NO: 1642 - DNA, 2449 bp, Homo sapiens
ggccgcgctgccgatcgccgggaggacccccgcctcgccgaagacgggcggggcaagccgagcctcacggggtccccggagctgggccgggcctccagatggagaaggcgcaacggggagttcttgagtaagccagagcggtgtccagcgcggtgtagccgcagccgccgctgtcaggcgcagcaacgggcaaccccgtagaagtcggtcggcaggtcctctccaacccgccgctaccgcgccgctgtgggagagaccccagcaggagcccaaaggcagctacgggggcgcgaaggccgctggcgccgcctcggccagcccttcccgcgcggttccactgccttaaggatgacagtcgtagggaaccctcgaagttggagctgccagtggttgccaatcctgatactgttgctgggcacaggccatgggccaggggtggaaggcgtgacacactacaaggccggcgaccctgttattctgtatgtcaacaaagtgggaccctaccataaccctcaggaaacttaccactactatcagcttccagtctgctgccctgagaagatacgtcacaaaagccttagcctgggtgaagtgctggatggggaccgaatggctgagtctttgtatgagatccgctttcgggaaaacgtggagaagagaattctgtgccacatgcagctcagttctgcacaggtggagcagctgcgccaggccattgaagaactgtactactttgaatttgtggtagatgacttgccaatccggggctttgtgggctacatggaggagagtggtttcctgccacacagccacaagataggactctggacccatttggacttccacctagaattccatggagaccgaattatatttgccaatgtttcagtgcgggacgtcaagccccacagcttggatgggttacgacctgacgagttcctaggccttacccacacttatagcgtgcgctggtctgagacttcagtggagcgtcggagtgacaggcgccgtggtgacgatggtggtttctttcctcgaacactggaaatccattggttgtccatcatcaactccatggtgcttgtgtttttactggtgggttttgtggctgtcattctaatgcgtgtgcttcggaatgacctggctcggtacaacttagatgaggagaccacctctgcaggttctggtgatgactttgaccagggtgacaatggctggaaaattatccatacagatgtcttccgcttccccccataccgtggtctgctctgtgctgtgcttggcgtgggtgcccagttcctggcccttggcactggcattattgtcatggcactgctgggcatgttcaatgtgcaccgtcatggggccattaactcagcagccatcttgttgtatgccctgacctgctgcatctctggctacgtgtccagccacttctaccggcagattggaggcgagcgttgggtgtggaacatcattctcaccaccagtctcttctctgtgcctttcttcctgacgtggagtgtggtgaactcagtgcattgggccaatggttcgacacaggctctgccagccacaaccatcctgctgcttctgacggtttggctgctggtgggctttcccctcactgtcattggaggcatctttgggaagaacaacgccagcccctttgatgcaccctgtcgcaccaagaacatcgcccgggagattccaccccagccctggtacaagtctactgtcatccacatgactgttggaggcttcctgcctttcagtgccatctctgtggagctgtactacatctttgccacagtatggggtcgggagcagtacactttgtacggcatcctcttctttgtcttcgccatcctgctgagtgtgggggcttgcatctccattgcactcacctacttccagttgtctggggaggattaccgctggtggtggcgatctgtgctgagtgttggctccaccggcctcttcatcttcctctactcagttttctattatgcccggcgctccaacatgtctggggcagtacagacagtagagttcttcggctactccttactcactggttatgtcttcttcctcatgctgggcaccatctcctttttttcttccctaaagttcatccggtatatctatgttaacctcaagatggactgagttctgtatggcagaactattgctgttctctccctttcttcatgccctgttgaactctcctaccagcttctcttctgattgactgaattgtgtgatggcattgttgccttcccttttgccctttgggcattccttccccagagagggcctggaaattataaatctctatcacataaggattatatatttgaactttttaagttgcctttagttttggtcctgatttttctttttacaattaccaaaataaaatttattaagaaaaaggaaaaaaaaaaaa

SEQ ID NO: 1643 - DNA, 2111 bp, Homo sapiens
ccaggtgcacagcgcatcgcccgaggctgtcaccgccctgccccgcccaccccagctgtcctggacccaggggcagggagaggctggacgccaggtgcgcggacacagaagcgtctaagcacagcttcctccttgccgctccgggaagtgggcagccagcccaggaaccagtaccacctgcaccatggggctgtcccggaaggagcaggtcttcttggccctgctgggggcctcgggggtctcaggcctcacggcactcattctcctcctggtggaggccaccagcgtgctcctgcccacagacatcaagtttgggatcgtgtttgatgcgggctcctcccacacgtccctcttcctgtatcagtggctggcgaacaaggagaatggcacgggtgtggtcagccaggccctggcctgccaggtggaagggcctggaatctcctcctacacttctaatgctgcacaggctggtgagagcctgcagggctgcttggaggaggcgctggtgctgatcccagaggcccagcatcggaaaacacccacgttcctgggggccacggctggcatgaggttgctcagccggaagaacagctctcaggccagggacatctttgcagcagtcacccaggtcctgggccggtctcccgtggacttttggggtgccgagctcctggccgggcaggccgaaggtgcctttggttggatcactgtcaactacggcttggggacgctggtcaagtactccttcactggagaatggatccagcctccggaggagatgctggtgggtgccctggacatgggaggggcctccacccagatcacgttcgtgcctgggggccccatcttggacaagagcacccaggccgattttcgcctctacggctccgactacagcgtctacactcacagctacctgtgctttggacgggaccagatgctgagcaggctcctcgtggggctggtacagagccgcccggctgccctgctccgtcacccgtgctacctcagcggctaccagaccacactggccctgggcccgctgtatgagtcaccctgtgtccacgccacgcccccgctgagcctcccccagaacctcacagttgaagggacaggcaaccctggagcctgcgtctcagccatccgggaacttttcaacttctccagctgccagggccaggaggactgcgcctttgacggggtctaccagcccccgctgcggggccagttctatgtggaggccagctaccctgggcaggaccgctggctgcgggactactgtgcctcaggcctgtacatcctcaccctcctgcacgagggctacgggttcagcgaggagacctggcccagcctcgagttccgaaagcaggcgggcggtgtggacattggctggacactgggctacatgctgaacctgaccgggatgatcccggccgatgcgccggctcagtggcgggcagagagctacggcgtctgggtggccaaagtggtgttcatggtgctggccctggtggcggtggtgggggctgccttggtccagctcttctggttgcaggactagtgggaaggcggaggtgggcccccacagagcccacaggcagctgcgtcccggatgctggaggcttcctgagccctgagcgccgtggggccttgctctgtggctctgcccacggtcaggtgacagccacctccagggcaccgtcagggtggtgctggccacagaggctgcatgacctcccctcccggcgtccctcccccaacctccttccgcaactgggcttccagggccgtaggtgcctttctgcacacaggccgccaggactcgtggtgtctccaggctgtgtgactgcagggccacatgctgcctgcaaacagggcaagaccacggaggcacaggggtcctgctcctgatggggcctcaggaggggcggagaggggtggaagggagggagctgccccacctggacccccgctctccctgctgttgtctgagcagatggatggagtccaggcctgggggcttctgctgggccagcccggcctcccacacccacttggagggtgagactgcagtgggggttgtttttattaaaagcatcatggacacagca

SEQ ID NO: 1644 - DNA, 4449 bp, Homo sapiens
gttaccatagcgacgtgcacgcagtagccaggcctgacccgctggtcccttgctggcgggaggaaagaggcggcaccatgagccacgcagtaaccatcgaggagccccaggcccagccgcaggtgtctcaaactcggtaccgggagaggtcgcgggctgggagccacatctcctccaatcgagcgtatgattttctgtacgatccattgtttattgtgtcaagtgagaaagaccatacacaggcaaatatccaagctaccctgattcgcagcagactgagaaaagttcccaggtttaaaaccatgttcagtaacctgatccattatccaagatattctctatattggagcaagtcagatcctgtcccaccatttatcagtcgggaatggaagggacataaggagaaacacagagaagccctccggcagctcaccacaactgacgcttcttttcagatgcctaaagaagtttatgaagatcctgaagttactggaaagaatcgctataaatactttgaaaggccttttctcccattttttcagcagatgccattcaatgttgtttatgccgtatccaaggcagaaccatacacttttcctcctacttctactaagcacctatccatcccttcaaagtctactgtgggcactcagactgattatcgggatgctgacgttcaaacagatccatactctccagaatatgtagtatgtcaggactcaatccctgagctcttgaccctggctacgcttacttggggtcggggtctcccagcaggacaagctgaggtggagatgatagaaagagcccgcgagaagcgtgcttgggaagcctctctccccgctctgagtgacacctcccagtttgagaagaggaggaaaatgatgaatgaaatggagaggaaggagtgggccttcagagagcaggagattgaaaaactgcaggagattcgcctggaagttctaaaagagctgttgaggaagcgtgaagagaatcagaatgaagtgaatatgaagcacttgaatgcccggtggtctaaactgcaggagggaaaagaggcaaaaatggcaaaaattcagcgcacgcatgtatcaacaatcagaaaacttgtaggaaagagaaagaatatagaagggaagttggagagaagaaatatcatcaaggattattctgattatgcatcacaggtctatggacctctgtctcgtcttgggtgtttcccagacaacaactcagaggactttgtagtaaaaaactactatctcaacacctatgaaggattagtggaacttgagtcatgtctcccagattttgtgacacaaccccaaatcagagctccaaaacctaaagtcattaccaccaaagctggttttctgaagagggcagcaaggttggactatgagttggcagaggttcataaggcactgttggataagaagaataaagttcttgaagtaaagaaaccccctcgcttccttcaaagaaacccaatacctcaacctcggcttccaactccaaccttggaaatgacgtccaatgaagaagaagaaatggaaatggctgtgatctaccttcaaaagttactccggggcagagtcgttcagaacatgatgtttgaagggaaagaaaagcgactggagttgatccaggagttgcgcacctgccacgcactacaagaagatgaaaagctggtgaaaaaagccgagaagcaagtgaccctggccttacagcggcagaggaacttgcatgagcacaaggtgtcactggttgaaaaccatttggccggactggaaggaagggcactagcagacatgtttgacttcctgtccaaagagctggtgagactgcaggaggagaggaggatccatgcctttgtcatgctggctgagcgccagcggcgggtacgagaggctgaagagagtggtcggcgccaggtggaaaaacagcgcctgcgggaggaggacgagatatttaaggaggtggttaaagttcaccatagtactataagctcctacctagaagacataatactgaataccgaagcgaatactgcagaagaacaagccagggcagaaatagagaagatggctgagaaaatcaatgacattgcttatgaaatggaaagccgccgaacctatcttcagtcagaggagattgttgctgagttggtttatagttttctgatcccagaggtgcaaaaatactttgtcaaagaaaaagtgaggaacgcacagcggaaacatattcttgcagcccatcagatcatccacagttacacggaaagcatggttcaaaagaaattaactgagggagagcaagatgaggcctcaaatgctgccatgttacttgagaaagaaactcaaaatgagaacaacagctaagattgtgatttttttgtaaaagaagctgtacgaatcatcataaataattccaatagtctgcacttctcccaaggtgtgcactgctcataaacttgccagtgtgtgattcatgagaaaggagatttattttccttaaacatccaataatttaaaatgattttcaataataataatcaaatgaaaaagcttcattctcttcagtgtcttctagatgccctacttaaagagaacattttcttatgtctcatttcaatattttgttaactatgaggatgtgctggtttgttgaatcaaacaaaaggaaatgttgtggaatatttttccaagtagttttggttcactattcacaggacattggcattatctactaaggctgaaaatgtgcatattccatgactcaggattttatctcctagatatatattcaacagaaatgcatgagtatgtgcaccaacaggcatgacaaaaatatttatagtagtggtgttcacaatagtcccaaactggaaacccaagtgtccatctccatcggaacagaaaactatactttggtctgcttctacagtggcacatcaacccacctttgagctttagatctaagaagtgtgttcatgcaacagccatagagatggtgctattgaaaggcaatctgcccatcctgtgtattgacaagcatcaggattccaggaggattcttcctgattcaaagactgtcaaataggaaaaaagaaaacagtaaatgaacaaaaacatcaacatggagtccaagtaatgaatttatagaggaaaatgtatgctactctgaaaacaaagcttatgttagagaatatcttactgtaagaaacaaggaaaattgcagaaacatttgctgagtgtttttaataggagtcaaaaagaaagggtcttttcagaaactgaagtaggaaataataacagacaaggtcaaaaaatagatgcaggctgaaaagaaaaggaagtgggctaagatgggaaaaatataaaaagatttaaaatccagcaacaaaatttacacattcatttggatgcagtgaaaagggcagaaataccacagcagagaataaaattgataatgttggcaacacatttattaagtgatccaacatgggatgggaaggaatgggcaaagagattaaaatgacagaagttagctgtagatgacctatcccacagcaatcggagttcttgaagaagaaaccagaacaaataaaatagaaacaataatcagagtttaataattaattttctgagtttttttttaaaaaaactaattatacaaacttgaaagggttcaccttgccctagcaaaactaggattgggacacctttttttccccctgaggatcactgacaaaaaacactgcaccagtaaggaagcaactaaattttgttttgttctttgaaaaaggctaacctgagctaggtaaaggttatatcattcacttttgaaataaaccatcgagaacacaaaatgacaagtgagttaggttgggctgatgggatagaaggtgggaggggaatgctatacagctgggaacagcagactttctctgaagggccagatggtaactacattagggtttgcgggtctgatggtcgccatcataactgcatactcaactctgccgttgtagggtaagagcagcactcgatgacacagaaatgaatgcacatgactgtgttccagtaaaattttattttaattaaaatcaattcatgtttgaaaaaggatttaaagtagcttctaataaaggacatgtgtaatgaaacttaaaatatgatattttctttaaaaatctttatccttatgtagacttctaaaactatgttttgcatttagacagtcaaggaaaatacaagttgttatacaattctcattgactaattgaagtttactaggagaggaaaactttttcttgataccggcaatcttttacttataatggcttgagttaaaatgctccaacttttctaatttttgcttttgaaaataaaacacctatagtgacaataaaaacacacatttaaagccaaaaaaaaaaaaaaaaaa

SEQ ID NO: 1645 - DNA, 2306 bp, Homo sapiens
agggccccgccctgccttctggggcaaagcggagagtggtcggttctgccccacagtaacgcgaggaaagaaatctcgcgaggctggagttctccgggagcgccggtcggaggcggtcggcggaggtgtctaccccgccggtgatggcgttgaacgccactggcttcccggccttccgtccgctgcctccgtccgattctgcgtctgcttgctgaggaggcggattaggggggcgcggagtctcttcccttgagtgcataggtcccggttggtagagggtttgagtccgcatcgccacagctgaaggctgcgagggactaagagcagaatatatctttagaaatgagttgcacaattgagaaggcacttgccgacgctaaagctcttgttgaaagattaagagatcatgacgatgcagcagaatctctgattgagcaaaccacagctctcaacaagcgagtagaagccatgaaacagtatcaggaagaaattcaagaacttaatgaagtcgcgagacatcggccacggtccacgttagttatgggaatccagcaagaaaacagacaaatcagagagttgcaacaagaaaacaaagaattacgtacatctctggaagaacatcagtcggccttggaacttataatgagcaagtaccgagaacaaatgtttagattgctaatggctagcaaaaaagatgatccgggtataataatgaagttaaaagagcagcactccaagattgacatggtacatcgtaacaagtccgaaggattcttccttgatgcatctcgacacatccttgaagcacctcaacatggactggagagaaggcacttggaagcaaatcagaatgaactgcaagcacatgttgaccagataactgaaatggcagcagtaatgaggaaagccattgaaattgacgagcaacagggttgcaaggaacaagaacgaatatttcaacttgaacaagaaaacaaaggcttgagagagatccttcaaataactcgagaatcatttttgaacctaaggaaagatgatgcgtcggaaagtacttctttgtcagcattagtgaccaacagtgatttgagtctgaggaagagctgaagagtttctgagtctgtgagcttcttacatggctccaaatggtcaaataagtgaatgaatgaatggacagaaaattcaatcctttatttttttctctgtaaatatgtacagtgcacgggctatgagatagcaacaaaaaatgcatagttaatggtcatagactttattccaaaacataattggaaaatagaaactgagccattgccaaatggtaaagaaatgaaaagttttcacagtgactactgaatataccaagagcttttggcagtactgctggctttctgggtgattaattaggtaaacttgaatattcccagtaaatgtttgagaatgcataaaattataccaatttaaaaatataaatttttgccactgttttgtgaacggaggatttgtacgctaaatttcatccttatttggcgtcaaagttgatgcaaagtttatgtaccatgagacttctagtgattgcctactttcacatttatttaaatttttgtgaaagaaaatacagttttaaaggctataggaatgtgttatatgtaccttaaacagataatttaattttagcaatttatcataactgatacttagctaacaattgtccataacttgtttaagtgtaagaaataccatttcaggaatgaaaaagaaggaatactactttctaagaaagaagatcttataatagacatatttagtaggttaaactactcctttgaaagaataagttttggttcaaagtcaataatgaagacgagatttgtttttctcttctctggctgatttttaaggatattatgtagttcatttagttaacagaattgaaatgtttgatatggcaagataggtatggtaatttcaaagtgaattgggaattcctctggctcatagaacccttttttttttcctttaagtattcttgagatacaaaaaaaaaaagtaaataaaatttcaaaaaaaaagttccggatctgtttttaagctccatctggtcctcataacctgcaagatttttcttaaaacctttcagctgaaagtgggggtaaaggtggagtaatctgtggatttgtttctgttgtcttttaaaatgtcaaatatataatatgtaatttttttaaaaaccaccagatacagaaatgtgctttaacatcagttgaaacctaaattttcttatgttgtggtgattgtattaaaaaaaaaat

SEQ ID NO: 1646 - DNA, 4513 bp, Homo sapiens
ccacgcgtccgcagagccgcgggtgagatccccagccctgtgagcctgtaggagtagaatggctccccaaatgtatgagttccatctgccattatccccagaggagttgttgaaaagtggaggggtgaatcagtatgttgtgcaagaggtactgtccatcaaacatcttccaccacagcttagagcttttcaggctgcctttcgagctcaggggcccctggctatgctgcagcactttgatactatctacagcattttgcatcactttcgaagtatagatcctggcctcaaagaagatactctggaattcctgataaaagtggtatcccgccactcccaggagcttccagctatcctggatgatacaactttgagtggatcagatagaaacgcccatctaaatgccctcaaaatgaactgttatgctctgatacgtctcctggaatcctttgagaccatggccagccagacaaaccttgtggacctggaccttggtgggaagggtaagaaagctcggaccaaggcagcccatggctttgactgggaagaagagaggcaaccaattcttcagcttttaacacagctacttcagttggacatccgtcacctgtggaaccactcaataattgaagaagaatttgtcagtttggttactggctgttgctaccgccttctggagaatcccaccattaatcaccagaagaaccgccccactcgggaagccataacacacctgcttggtgtagccttgacccgttataaccatatgctcagtgctacagtgaagatcatccagatgctgcagcactttgaacacctggcacctgtactggttgcagccgtgagtctatgggcaactgactatggaatgaagagcatagtgggagagattgtaagagagattggacaaaagtgtccccaagagctgagtcgagacccttcagggacaaagggctttgcagcattcctgacagaactagcagaacgtgtcccagctatcctgatgtccagcatgtgcattttgctagatcacctggatggagaaaattacatgatgcgtaatgctgtgctggcagccatggcggagatggtgctgcaggttctcagtggcgatcaactggaagcagcagcccgagacaccagagaccagttcttggatactttacaagcccatggccatgatgtcaactcctttgtgcggagccgtgttttgcagctcttcacccgaattgtccagcagaaggctctccccctgacacgtttccaggcagtggtggctttagctgtgggacgtctggcagacaagtcagtgctagtatgtaaaaatgccatccagctgctggccagttttctagccaataatcctttctcctgcaagcttagtgatgctgaccttgccggaccactgcagaaggagacccagaaattacaagagatgagggcccagaggcgaactgcagcagcttctgcagtgctggacccagaggaggagtgggaagccatgctgccagagttgaagtctaccctgcagcagcttctacagcttccccagggagaggaggagattcctgagcaaattgccaatacagagacaactgaagatgtgaaaggacgcatctatcaactgcttgccaaagctagttacaaaaaggccatcattctcactcgagaagccacaggccacttccaggagtccgaacccttcagtcatatagacccagaggagtcagaggagaccaggctcttgaatatcttaggacttatcttcaaaggcccagcagcttccacacaagaaaagaatccccgggagtctacaggaaacatggtcacaggacagactgtctgtaaaaataaacccaatatgtcggatcctgaggaatccaggggaaatgatgaactagtgaagcaggagatgctggtacagtatctgcaggatgcctacagcttctcccggaagattacagaggccattggcataatcagcaagatgatgtatgaaaacacaactacagtggtgcaggaggtgattgaattctttgtgatggtcttccaatttggggtaccccaggccctgtttggggtgcgccgtatgctgcctctcatctggtctaaggagcctggtgtccgggaagccgtgcttaatgcctaccgccaactctacctcaaccccaaaggggactctgccagagccaaggcccaggctttgattcagaatctctctctgctgctagtggatgcctcggttgggaccattcagtgtcttgaggaaattctctgtgagtttgtgcagaaggatgagttgaaaccagcagtgacccagctgctgtgggagcgggccaccgagaaggtcgcctgctgtcctctggagcgctgttcctctgtcatgcttcttggcatgatggcacgaggaaagccagaaattgtgggaagcaatttagacacactggtgagcatagggctggatgagaagtttccacaggactacaggctggcccagcaggtgtgccatgccattgccaacatctcggacaggagaaagccttctctgggcaaacgtcacccccccttccggctgcctcaggaacacaggttgtttgagcgactgcgggagacagtcacaaaaggctttgtccacccagacccactctggatcccattcaaagaggtggcagtgaccctcatttaccaactggcagagggccccgaagtgatctgtgcccagatattgcagggctgtgcaaaacaggccctggagaagctagaagagaagagaaccagtcaggaggacccgaaggagtcccccgcaatgctccccactttcctgttgatgaacctgctgtccctggctggggatgtggctctgcagcagctggtccacttggagcaggcagtgagtggagagctctgccggcgccgagttctccgggaagaacaggagcacaagaccaaagatcccaaggagaagaatacgagctctgagaccaccatggaggaggagctggggctggttggggcaacagcagatgacacagaggcagaactaatccgtggcatctgcgagatggaactgttggatggcaaacagacactggctgcctttgttccactcttgcttaaagtctgtaacaacccaggcctctatagcaacccagacctctctgcagctgcttcacttgcccttggcaagttctgcatgatcagtgccactttctgcgactcccagcttcgtcttctgttcaccatgctggaaaagtctccacttcccattgtccggtctaacctcatggttgccactggggatctggccatccgctttcccaatctggtggacccctggactcctcatctgtatgctcgcctccgggaccctgctcagcaagtgcggaaaacagcggggctggtgatgacccacctgatcctcaaggacatggtgaaggtgaaggggcaggtcagcgagatggcggtgctgctcatcgaccccgagcctcagattgctgccctggccaagaacttcttcaatgagctctcccacaagggcaacgcaatctataatctccttccagatatcatcagccgcctgtcagaccccgagctgggggtggaggaagagcctttccacaccatcatgaaacagctcctctcctacatcaccaaggacaagcagacagagagcctggtggaaaagctgtgtcagcggttccgcacatcccgaactgagcggcagcagcgagacctggcctactgtgtgtcacagctgcccctcacagagcgaggcctccgtaagatgcttgacaattttgactgttttggagacaaactgtcagatgagtccatcttcagtgcttttttgtcagttgtgggcaagctgcgacgtggggccaagcctgagggcaaggctataatagatgaatttgagcagaagcttcgggcctgtcataccagaggtttggatggaatcaaggagcttgagattggccaagcaggtagccagagagcgccatcagccaagaaaccatccagtggttctaggtaccagcctctggcttctacagcctcagacaatgactttgtcacaccagagccccgccgtactacccgtcggcatccaaacacccagcagcgagcttccaaaaagaaacccaaagttgtcttctcaagtgatgagtccagtgaggaagatctttcagcagagatgacagaagacgagacacccaagaaaacaactcccattctcagagcatcggctcgcaggcacagatcctaggaagtctgttcctgtcctccctgtgcagggtatcctgtagggtgacctggaattcgaattctgtttcccttgtaaaatatttgtctgtctctttttttaaaaaaaaaaaaaaaaggccgggcactgtggctcacgcctgtaatcccagcactttgcgataccaaggcgggtggataacctgaggtagggagttcgagaccagcctgaccaacatggagaaaccccatctctactaaaaaaaaaaaaaaa

SEQ ID NO: 1647 - DNA, 3431 bp, Homo sapiens
ggttttcaggagcccgagcgagggcgccgcttttgcgtccgggaggagccaaccgtggcgcaggcggcgcggggaggcgtcccagagtctcactctgccgcccaggctggactgcagtgacacaatctcggctgactgcaaccactgcctccagggttcaagcgattctcttgcctcagcctcccaagtagctgggattacagattgatgttcatgttcctgacactactacaagattcatactcctgatgctactgacaacgtggcttctccacagtcaccaaaccagggatgctatactggacttccctactctcatctgctccagccccctgaccttatagttgcccagctttcctggcaattgactttgcccatcaatacacaggatttagcatccagggaagatgtcggagcctcagatgttaattttctaattgagaatgttggcgctgtccgaacctggagacaggaaaacaaaaagtcctttctcctgattcaccaaaaaataaaatactgactaccatcactgtgatgagattcctatagtctcaggaactgaagtctttaaacaaccagggaccctctgcccctagaataagaacatactagaagtcccttctgctaggacaacgaggatcatgggagaccacctggaccttctcctaggagtggtgctcatggccggtcctgtgtttggaattccttcctgctcctttgatggccgaatagccttttatcgtttctgcaacctcacccaggtcccccaggtcctcaacaccactgagaggctcctgctgagcttcaactatatcaggacagtcactgcttcatccttcccctttctggaacagctgcagctgctggagctcgggagccagtatacccccttgactattgacaaggaggccttcagaaacctgcccaaccttagaatcttggacctgggaagtagtaagatatacttcttgcatccagatgcttttcagggactgttccatctgtttgaacttagactgtatttctgtggtctctctgatgctgtattgaaagatggttatttcagaaatttaaaggctttaactcgcttggatctatccaaaaatcagattcgtagcctttaccttcatccttcatttgggaagttgaattccttaaagtccatagatttttcctccaaccaaatattccttgtatgtgaacatgagctcgagcccctacaagggaaaacgctctccttttttagcctcgcagctaatagcttgtatagcagagtctcagtggactggggaaaatgtatgaacccattcagaaacatggtgctggagatactagatgtttctggaaatggctggacagtggacatcacaggaaactttagcaatgccatcagcaaaagccaggccttctctttgattcttgcccaccacatcatgggtgccgggtttggcttccataacatcaaagatcctgaccagaacacatttgctggcctggccagaagttcagtgagacacctggatctttcacatgggtttgtcttctccctgaactcacgagtctttgagacactcaaggatttgaaggttctgaaccttgcctacaacaagataaataagattgcagatgaagcattttacggacttgacaacctccaagttctcaatttgtcatataaccttctgggggaactttacagttcgaatttctatggactacctaaggtagcctacattgatttgcaaaagaatcacattgcaataattcaagaccaaacattcaaattcctggaaaaattacagaccttggatctccgagacaatgctcttacaaccattcattttattccaagcatacccgatatcttcttgagtggcaataaactagtgactttgccaaagatcaaccttacagcgaacctcatccacttatcagaaaacaggctagaaaatctagatattctctactttctcctacgggtacctcatctccagattctcattttaaatcaaaatcgcttctcctcctgtagtggagatcaaaccccttcagagaatcccagcttagaacagcttttccttggagaaaatatgttgcaacttgcctgggaaactgagctctgttgggatgtttttgagggactttctcatcttcaagttctgtatttgaatcataactatcttaattcccttccaccaggagtatttagccatctgactgcattaaggggactaagcctcaactccaacaggctgacagttctttctcacaatgatttacctgctaatttagagatcctggacatatccaggaaccagctcctagctcctaatcctgatgtatttgtatcacttagtgtcttggatataactcataacaagttcatttgtgaatgtgaacttagcacttttatcaattggcttaatcacaccaatgtcactatagctgggcctcctgcagacatatattgtgtgtaccctgactcgttctctggggtttccctcttctctctttccacggaaggttgtgatgaagaggaagtcttaaagtccctaaagttctcccttttcattgtatgcactgtcactctgactctgttcctcatgaccatcctcacagtcacaaagttccggggcttctgttttatctgttataagacagcccagagactggtgttcaaggaccatccccagggcacagaacctgatatgtacaaatatgatgcctatttgtgcttcagcagcaaagacttcacatgggtgcagaatgctttgctcaaacacctggacactcaatacagtgaccaaaacagattcaacctgtgctttgaagaaagagactttgtcccaggagaaaaccgcattgccaatatccaggatgccatctggaacagtagaaagatcgtttgtcttgtgagcagacacttccttagagatggctggtgccttgaagccttcagttatgcccagggcaggtgcttatctgaccttaacagtgctctcatcatggtggtggttgggtccttgtcccagtaccagttgatgaaacatcaatccatcagaggctttgtacagaaacagcagtatttgaggtggcctgaggatctccaggatgttggctggtttcttcataaactctctcaacagatactaaagaaagaaaaagaaaagaagaaagacaataacattccgttgcaaactgtagcaaccatctcctaatcaaaggagcaatttccaacttatctcaagccacaaataactcttcactttgtatttgcaccaagttatcattttggggtcctctctggaggttttttttttctttttgctactatgaaaacaacataaatctctcaattttcgtatcaacaccatgttctgtctcactaacctccaaatggaaaataatagatctagaaaattgcaactgcc

SEQ ID NO: 1648 - DNA, 1572 bp, Homo sapiens; identical to SEQ ID NO: 272

SEQ ID NO: 1649 - DNA, 3671 bp, Homo sapiens
ggcgggcgctcggcgactcgtccccggggccccgcgcgggcccgggcagcaggggcgtgatgtcacggcagggagggggcgcgggagccgccgggccggcggggaggcgggggaggtgttttccagctttaaaaaggcaggaggcagagcgcggccctgcgtcagagcgagactcagaggctccgaactcgccggcggagtcgccgcgccagatcccagcagcagggcgcgggcaccggggcgcgggcagggctcggagccaccgcgcaggtcctagggccgcggccgggccccgccacgcgcgcacacgcccctcgatgactttcctccggggcgcgcggcgctgagcccggggcgagggctgtcttcccggagacccgaccccggcagcgcggggcggccgcttctcctgtgcctccgcccgccgctccactccccgccgccgccgcgcggatgccaagcaccagctttccagtcccttccaagtttccacttggccctgcggctgcggtcttcgggagaggagaaactttggggcccgcgccgcgcgccggcggcaccatgaagtcagcggaggaagcccgaccctgcccgccctggactggcagctgccgtcccactcaggcccgtatgagcttcggattgaggtgcagcccaagtcccaccaccgagcccactacgagacggagggcagccggggggccgtgaaggcgtcggccggaggacaccccatcgtgcagctgcatggctacttggagaatgagccgctgatgctgcagcttttcattgggacggcggacgaccgcctgctgcgcccgcacgccttctaccaggtgcaccgcatcacagggaagaccgtgtccaccaccagccacgaggccatcctctccaacaccaaagtcctggagatcccactcctgccggagaacagcatgcgagccgtcattgactgtgccggaatcctgaaactcagaaactccgacattgaacttcggaaaggagagacggacatcgggaggaagaacacacgggtacggctggtgttccgcgttcacgtcccgcaacccagcggccgcacgctgtccctgcaggtggcctccaaccccatcgaatgctcccagcgctcagctcaggagctgcctctggtggagaagcagagcacggacagctatccggtcgtgggcgggaagaagatggtcctgtctggccacaacttcctgcaggactccaaggtcattttcgtggagaaagccccagatggccaccatgtctgggagatggaagcgaaaactgaccgggacctgtgcaagccgaattctctggtggttgagatcccgccatttcggaatcagaggataaccagccccgttcacgtcagtttctacgtctgcaacgggaagagaaagcgaagccagtaccagcgtttcacctaccttcccgccaacgttccaattataaaaacagaacccactgatgattatgagcctgctccaacctgtggaccggtgagccaggggttaagtcctctcccaagaccatactacagccagcagctcgcgatgccacccgaccccagctcctgcctcgtggccggcttcccgccctgtccgcagagaagcaccctgatgccagcggcccctggcgtgagccccaagctccacgacctttctcccgctgcctacaccaagggcgttgccagcccgggccactgtcacctcggactcccgcagccggccggagaggcccccgccgtccaggacgtgcccaggccagtggccacgcaccccggctcgcccgggcagccacccccggccctgctgccacagcagtaaatgaaataatacgaaatgacctctccagcacgagcacccactcctagttgccacattggagcactcagttcagcaggggtatgctgacttcagcagacaaagacttttgaataaataaactgaactcacacctggtaccactcagaacctccaactgactgaatgccaggagctgaacattaatatgtgcaaagattggctctccaacaagaaggaaagcagggaggaagggagaccactgtgtcacctggaggagaagtcatctcatgacaacagaagggaggtggccgggctgagcacgggagacccaccgtgcaggggcctttcatgggaacggcccacacgcagtttgaccccacgcccagcccttctggcacccctggggttcaatactggaagtgccttatttaaccagaccatcagggcatcatagaattgagcattgaatttgctactgtaggagtatttttaggagcagaaactgcaaacacatttcattgtgaggttttaccctctgtatgaatgaagagaacgctggaaggctgcgagaggactctagtatgagtctccaacatttggaacgtttcctgggctgtcacgtacactcctgctgccttacacagtgcattttagaatcttccagtctgtcatctcagctcttttgtaacatgcttcccttgtctgcgcggttgaaaccgtaggcttgttcatagtcgcatgctcgcatctttgtttttaatctggcttcgaacatagcacaagtaacttgaatagcacatcaataggttactggacaaaagcagaaaaacctgttacaggatagcctgcatttgcatgtgtgtacatatctaggcatctatttatgtataaataataacagagccgacgtgtcctcgcccaggagggcttccctgtcagcaataaccggcatccgttttggaacctgcgtctggggctccagtcgctgctcttgctggcgtccatcgccgcctcggacggccgtgcattttctcgtctcacgcagttcgaggaggaccctagaaagccaggagctgtgattgacagtagctgtaggttaccagacggcaacattagaaagtgattgtaaataacatgcaacctaagtgtaatatatttgttcagttataagatgattgtttcacagaagccttaccactctctgcttcatctaagaaaaccaataccaaaaacgccactttaatgctcagccctgcgttgtgtgttttcagatgagttactgttaacaggtaggtttgtgtaggccttgctgggcactctgtacaattagttgcttattacgtatgattactcacagcgatctattgttccatataaccaaaaagcatggtttattcattgaaacacggttgacctgaactcgtgccttaggaattaatgcccccttatggaacctgcctgaattgcacctgcgggtggaggctccggctgtgaagtcactgaacagaacgtcgctgatggagaaagggctcccgcagaaggaacggcctgtaccgtgcgctccggcacaatcgcgtctcttgtgtctcactcacggaaagaaacaacctgaaggccatcccgtcggtctgcacgtaaccgtgaagacgtgtggccgcgtcccacctgcggctgggtaccctgcacccggcactgtaggagtcacgtgcagcctttctcaggggactgtcattgaaaaggaaacgtttgatgtctgtgtcagctgtctttgtagttaggaaatagatccaataaagccgtatttttttgctggaaaaaaaaaaaaaaaaaaaaaaaaaaaaaaaaaaaaaaaaaaaaaaa

SEQ ID NO: 1650 - DNA, 3073 bp, Homo sapiens
atggggctgcagcccctggagttcagcgactgctacctcgacagcccgtggttccgggagaggatccgcgctcacgaagcggaactcgagaggaccaacaagttcatcaaagagctcattaaggacgggaagaacctcatcgctgcgacgaaaagtctgtcagtggcccagcggaagtttgctcattcactcagagactttaagtttgagtttatcggtgatgctgtgacagatgatgaacgatgcatagatgcttccttacgtgaattttcaaattttttgaagaatctggaggaacagagagaaattatggcattaagtgtaactgaaaccctgattaaacccttggaaaaattcagaaaagagcaacttggagctgtaaaggaagaaaaaaagaagtttgacaaagagacagaaaagaattatagtctaattgataaacatttgaatttatcagcaaaaaagaaagactcacatttacaagaggcagatatccaagtagagcagaaccggcaacacttctatgaactgtctctcgagtatgtgtgtaagctgcaggaaatccaagaaagaaagaagtttgagtttgtggaacctatgctgtcattttttcaggggatgtttaccttctatcatcagggccatgaacttgccaaagacttcaatcactacaaaatggaactacagatcaacattcagaatacacggaatcgatttgaaggaacaaggtcagaagtggaagagctcatgaacaaaatcagacagaatcccaaggaccacaaacgagcaagtcagtttacagccgaaggctacctgtatgtccaggaaaaaaggcctgctccgtttggttccagttgggtcaaacactattgcatgtatcgaaaagcagcaaagaagttcaacatgatcccatttgagcacagatctggagggaaacttggggacggagaggtgttctttttgaaagaatgtaccaagaggcatactgactccattgacagaaggttttgttttgacatagaagctgctgatcggcctggcgtttccttgaccatgcaggcattttccgaagaggaaaggaagcagtggttggaagctctgggtggaaaggaagctctgtcccatagttttaatacagccatcatcccaagaccagaaggaaatgcacagttggataagatggggttcacaattatcagaaaatgcatcagtgccgttgaaacacgaggtataaatgaccaaggattgtacagagttgtgggggtgagttcaaaggtccagagacttctgagtatgttgatggatgtaaaaacatgcaatgaggtggacctggagaattctgcagattgggaagtgaagacaataacaagtgccttgaaacagtatttgaggagtcttccagagcctctcatgacctatgagttacatggagatttcattgttccagccaaaagcggcagcccagaatctcgtgttaatgcgatccatttcttggtacacaaactgccagagaagaataaagagatgttggatattttggtgaaacacttaacaaatgtttcaaatcactccaagcagaacctgatgactgtggcaaacttaggagtggtgtttggaccaactctgatgaggccacaggaagaaactgtcgctgccctcatggacttgaagtttcagaatattgttgtggaaatcttaattgaaaaccatgaaaagatttttcggacgccgcccgatactacattccctgagcccacctgcctgtcagcatcacccccaaatgcgccaccaaggcagtcgaagagacaaggccagagaaccaagaggcccgtggccgtctacaatctttgtctggagctggaagatggtgacaatccttacccttccaaggaggacacccctaccagcagtctggactcactttcctccccgtctcccgtgactacagctgtccctgggcctcctggaccagacaaaaaccaccttctggcagatggagggagctttggagactgggcatccactatcccaggccagacccgatcgtctatggtccagtggcttaacccacagtctccaaccacaacaagctccaactcagctgtgacacctctttcacccgggtcgtcccctttccccttttctcctcctgctactgtagcggacaagccacctgaaagcatccgcagtcggaaggctcgagccgtgtatccgtgtgaagcagaacacagctcggaattatcttttgaaataggagcaatttttgaggatgtacaaacctccagggaacctggctggctagaagggactctgaacggcaagagggggctgattccacagaactacgtcaagctgctgtagctcctggcctcagagcccctgctgaccctggcacccagggacctgcctgggggcagagagctgtcttcctcctccgaggctctgggctgcacccacaggtacctccacacttgggagttaccatcatcacagtcagccctgggggtggggggtggtgggcagggatgggacgcaccacacagaactgtgattgtggatcaggaggggaatgtcaggattcgcaaaatggacttttcatttgtcaagtattgggacttgtgatttttaattatccagcatatagaatgagagggagggcagccttctgccacctgtgtcgcctccactggcagtcacgccaccagagccaccctggctccctctcctccctgagcacctgctgctgcgattttaaagggaactgtactactcgcagtgataggtttgcagagtgtgtgcttggctgtggcagcctagcttggagaagctgctgttggtgcaagggagatggtctcaagtcagagggaagcagagacgcgcgtctcaagcctgcccttcctagacggccacctgcaggaccccacactcactgcactggcagcgtgcactggcgtatttgtaacaggcttctcggtgctcctcacccgtgtgctgttttccaaacaccacctttttgcctcaaggtctctgtaaatgaaataaactgtaatttactaaaaaaaaaaaaaaaaaa

SEQ ID NO: 1651 - DNA, 2067 bp, Homo sapiens
gggcggaagcgctgccaggcgtccggagcggagcttccagggtctctgggtcgccagcgcgcgggcgcgcggctggagccggcgccgggcacggcatcgggggcctggactgcacggcccggcagcaggccggccatggagccaggcagcgtggagaacctgtccatcgtgtaccggagccgcgacttcctggtggtcaacaagcactgggacgttcgcattgacagcaaggcgtggcgggagactctgaccctgcagaagcagctgcggtaccgctttcccgagctggccgaccctgacacctgctacgggttcaggttctgccaccagctggatttctccaccagcggggcgctgtgcgtggccctaaacaaggcagccgccggcagcgcgtacaggtgcttcaaggagcggcgcgtgaccaaggcttacctggcattgctgcgggggcacatccaggagagccgggtaaccatcagccatgccattggcaggaacagcacggagggccgggcccacaccatgtgcatcgagggctcgcagggttgtgagaacccaaagccaagcctcacagatctcgtggttctggaacacgggctgtacgcaggcgatcctgtctccaaagtgctgctgaagccgctcacgggccggacacaccagctgcgcgtgcactgcagtgccctgggccaccccgtggtgggcgacctgacctacggagaagtctcgggccgggaggaccggccgttcagaatgatgctgcacgctttctacctgcgcatccccacggacaccgagtgtgtggaggtctgcacgcctgaccccttcctgccctccctggatgcctgctggagcccccacacactgctgcagtcgctggaccagctcgtgcaggccttacgggccacccccgaccctgaccccgaggataggggccccaggccaggcagcccctccgcactcctgcctgggcccggccggcctcctccacccccaaccaagccccctgagactgaggcacagcggggcccctgcctgcagtggctgtcggagtggacgctggaaccggacagctgagagccgtggggctggggcagggggtgtcagctgcacagcgggactctagggagatgggcgagcgagcgtctgctcactggctctggggcctcgaggtgccaggcagcatcaggcccactgggttgccccggccaggcctgcgaggaagggctgaggtggggccggcagggggcgccaggcagccgtgatcacaggtgacgaccgcaccgcggccgtgggactgatgcgggatcccgagggccttcctgcccacatgccccgggagaaaccgaggcccctccctcctcctggaacagcttccggctctcaagcgtcaccccaggggcgtcagttttacggactcaaggtcacctcaggaagaggcagggccaggttttgggataggctttgcctccaggatgggctgctcctgggcctggtgagctactgcccccaacctaccctctagaggggctgggaagggccgttctgggctcacctggcctgggagacccatctggtccctgcgtcctctgcccctcactgctctgtgcagatcctgtcgccctcagctgcctcctcccgagacctaatggtccctgctgggctcgagtctgcaggcccggctgcgtgtgccttggcctcactgtaccagtggttccctctctgcccggattctgagctcagtgtggtgtttggtgcacaggggttggtcaggggccatggccaaggccctgccacgcacgcccatccctcagatccactgtgagcaccaacctgctgcagtctcttgggcccctgctggcagctctgccacgtcaccgcctgcctggctcccacacagccatgcattgtcactctgcctccgggaccccagcttgggagctgtgggtctgccaggtcccacctcctctgtcccccatgccacaacctgggctcctggctacagcagggctccagggactccaaataaatgttcagtgactggctccaaggaaaaaaaaaaaaaaaaaa

SEQ ID NO: 1652 - DNA, 4830 bp, Homo sapiens; identical to SEQ ID NO: 1084

SEQ ID NO: 1653 - DNA, 3828 bp, Homo sapiens
aagacaacgtcactagcagtttctggagctacttgccaaggctgagtgtgagctgagcctgccccaccaccaagatgatcctgagcttgctgttcagccttgggggccccctgggctgggggctgctgggggcatgggcccaggcttccagtactagcctctctgatctgcagagctccaggacacctggggtctggaaggcagaggctgaggacaccagcaaggaccccgttggacgtaactggtgcccctacccaatgtccaagctggtcaccttactagctctttgcaaaacagagaaattcctcatccactcgcagcagccgtgtccgcagggagctccagactgccagaaagtcaaagtcatgtaccgcatggcccacaagccagtgtaccaggtcaagcagaaggtgctgacctctttggcctggaggtgctgccctggctacacgggccccaactgcgagcaccacgattccatggcaatccctgagcctgcagatcctggtgacagccaccaggaacctcaggatggaccagtcagcttcaaacctggccaccttgctgcagtgatcaatgaggttgaggtgcaacaggaacagcaggaacatctgctgggagatctccagaatgatgtgcaccgggtggcagacagcctgccaggcctgtggaaagccctgcctggtaacctcacagctgcagtgatggaagcaaatcaaacagggcacgagttccctgatagatccttggagcaggtgctgctaccccacgtggacaccttcctacaagtgcatttcagccccatctggaggagctttaaccaaagcctgcacagccttacccaggccataagaaacctgtctcttgacgtggaggccaaccgccaggccatctccagagtccaggacagtgccgtggccagggctgacttccaggagcttggtgccaaatttgaggccaaggtccaggagaacactcagagagtgggtcagctgcgacaggacgtggaggaccgcctgcacgcccagcactttaccctgcaccgctcgatctcagagctccaagccgatgtggacaccaaattgaagaggctgcacaaggctcaggaggccccagggaccaatggcagtctggtgttggcaacgcctggggctggggcaaggcctgagccggacagcctgcaggccaggctgggccagctgcagaggaacctctcagagctgcacatgaccacggcccgcagggaggaggagttgcagtacaccctggaggacatgagggccaccctgacccggcacgtggatgagatcaaggaactgtactccgaatcggacgagactttcgatcagattagcaaggtggagcggcaggtggaggagctgcaggtgaaccacacggcgctccgtgagctgcgcgtgatcctgatggagaagtctctgatcatggaggagaacaaggaggaggtggagcggcagctcctggagctcaacctcacgctgcagcacctgcagggtggccatgccgacctcatcaagtacgtgaaggactgcaattgccagaagctctatttagacctggacgtcatccgggagggccagagggacgccacgcgtgccctggaggagacccaggtgagcctggacgagcggcggcagctggacggctcctccctgcaggccctgcagaacgccgtggacgccgtgtcgctggccgtggacgcgcacaaagcggagggcgagcgggcgcgggcggccacgtcgcggctccggagccaagtgcaggcgctggatgacgaggtgggcgcgctgaaggcggccgcggccgaggcccgccacgaggtgcgccagctgcacagcgccttcgccgccctgctggaggacgcgctgcggcacgaggcggtgctggccgcgctcttcggggaggaggtgctggaggagatgtctgagcagacgccgggaccgctgcccctgagctacgagcagatccgcgtggccctgcaggacgccgctagcgggctgcaggagcaggcgctcggctgggacgagctggccgcccgagtgacggccctggagcaggcctcggagcccccgcggccggcagagcacctggagcccagccacgacgcgggccgcgaggaggccgccaccaccgccctggccgggctggcgcgggagctccagagcctgagcaacgacgtcaagaatgtcgggcggtgctgcgaggccgaggccggggccggggccgcctccctcaacgcctcccttgacggcctccacaacgcactcttcgccactcagcgcagcttggagcagcaccagcggctcttccacagcctctttgggaacttccaagggctcatggaagccaacgtcagcctggacctggggaagctgcagaccatgctgagcaggaaagggaagaagcagcagaaagacctggaagctccccggaagagggacaagaaggaagcggagcctttggtggacatacgggtcacagggcctgtgccaggtgccttgggcgcggcgctctgggaggcaggatcccctgtggccttctatgccagcttttcagaagggacggctgccctgcagacagtgaagttcaacaccacatacatcaacattggcagcagctacttccctgaacatggctacttccgagcccctgagcgtggtgtctacctgtttgcagtgagcgttgaatttggcccagggccaggcaccgggcagctggtgtttggaggtcaccatcggactccagtctgtaccactgggcaggggagtggaagcacagcaacggtctttgccatggctgagctgcagaagggtgagcgagtatggtttgagttaacccagggatcaataacaaagagaagcctgtcgggcactgcatttgggggcttcctgatgtttaagacctgaaccccagccccaatctgatcagacatcatggactcgcccagctctcctcggcctggggctctggccaaggatgggctggaggtcattcagttggtctgtctcttccctggaaaccttctgcaaagatggtgtggtgtacgtggcttccctgtaaccacatggggcttggccatttctccatgatgagaaggactggaatgcttctccgggcaggacatggtcctaggaagcctgaaccttggcttggcatgccttctcagacagcacggcctgggctccaactcttcaccacaccctgtattctacaacttctttggtgttttgctcctcctgtggttggaaacttctgtacaacactttaaacttttctcttgcttcctcttctcttctcccttatcgtatgatagaaagacattcttccccaggaggaatgtttaaaatggaggcaacattttggccaacattggaaagcactagagggcaatgggattaaaccaacctgcttggtctctattagtcagtaatgaagacgacagcctggccaaccaagggaaaggaaattagtatctttagtttcagtcattccttgtaggatatggtttagctgtgcccccacctaaaatatcatcttgaattgtaatccctataatccccacatcaagggagagatcaggtggaggtaattggatcttgggggcggttcccccatgctgttcttgtgatagttctcacgagatctgatgattttataagtttgatagttcctcctgtgttcattctccttcctgccaccttgtgaagatgccttggttcctcttcactgtctgccatgattgtaagtttcctgaggcctccccagccatgtggaacagtgagtcaattaaacctctttcctttataaatt

SEQ ID NO: 1654 - DNA, 2201 bp, Homo sapiens
caactacgagccacgagtttgcagatggggctgctcggcggcgcctgtggctgagggagagcagcggcggcggggagcgaccgggagcggcggcagcggcggcgcggaggcggctgaggtgcgagccggactaaatcattttgctactttaaaaaaatcacgaaagtacattatttgaagtttggagaagaaagggatttggtaacaaaggacagccatttccattttaagcagctaaacagcaggagagatttctgtaagaaggtaccagctcagattccattgttcatcattttgcaatgcagcaagtcttggaaaaccttacggagctgccctcgtctactggagcagaagaaatagacctaattttcctcaagggaattatggagaatcctattgtaaaatcacttgctaaggctcatgagaggctagaagattccaaactagaagctgtcagtgacaataacttggaattagtcaatgaaattcttgaagacatcactcctctaataaatgtggatgaaaatgtggcagaattggttggtatactcaaagaacctcacttccagtcactgttggaggcccatgatattgtggcatcaaagtgttatgattcacctccatcaagcccagaaatgaataattcttctatcaataatcagttattaccagtagatgccattcgtattcttggtattcacaaaagagctggggaaccactgggtgtgacatttagggttgaaaataatgatctggtaattgcccgaatcctccatgggggaatgatagatcgacaaggtctacttcatgtgggagatataattaaagaagtcaatggccatgaggttggaaataatccaaaggaattacaagaattactgaaaaatattagtggaagtgtcaccctaaaaatcttaccaagttatagagataccattactcctcaacaggtatttgtgaagtgtcattttgattataatccatacaatgacaacctaataccttgcaaagaagcaggattgaagttttccaaaggagaaattcttcagattgtaaatagagaagatccaaattggtggcaggctagccatgtaaaagagggaggaagcgctggtctcattccaagccagttcctggaagagaagagaaaggcatttgttagaagagactgggacaattcaggacctttttgtggaactataagtagcaaaaaaaagaaaaagatgatgtatctcacaaccagaaatgcagaatttgatcgtcatgaaatccagatatatgaggaggtagccaaaatgcctcccttccagagaaaaacattagtattgataggagctcaaggtgtaggccgaagaagcttgaaaaacaggttcatagtattgaatcccactagatttggaactacggtgccatttacttcacggaaaccaagggaagatgaaaaagatggccaggcatataagtttgtgtcacgatctgagatggaagcagatattaaagctggaaagtatttggaacatggggaatatgaaggaaatctctatggaaccaaaattgattctattcttgaggttgtccaaactggacggacttgcattctggatgtcaacccacaagcactgaaagtattgaggacatcagagtttatgccctatgtggtatttattgcggctccggagctagagacgttacgtgccatgcacaaggctgtggtggatgcaggaatcactaccaagcttctgaccgactctgacttgaagaaaacagtggatgaaagtgcacggattcagagagcatacaaccactattttgatttgatcatcataaatgataatctagacaaagcctttgaaaaactgcaaactgccatagagaaactgagaatggaaccacagtgggtcccaatcagctgggtttactgatgattcagtaaggttaacaatgaaaattaaactcttaaaaagtgactgcaacaaataaaccttctactgagaaaatacatcacagatagaagattatctgctaagtccaggcatttttatggtgtagattgaaataatagtacacttctgaatttttatataaaatgtggttggaaggtgtactaatatataatttatcttaatttttctaactttgtatggataatctttctattcatatcacataaagaaatgcgttgaagcaaaaaaaaaaaaaaa

SEQ ID NO: 1655 - DNA, 1835 bp, Homo sapiens
ctcgctgcgccaccgcctcccgccacccctgcccgcccgacagcgccgccgcctgccccgccatgggtcgacagaaggagctggtgtcccgctgcggggagatgctccacatccgctaccggctgctccgacaggcgctggccgagtgcctggggaccctcatcctggtgatgtttggctgtggctccgtggcccaggttgtgctcagccggggcacccacggtggtttcctcaccatcaacctggcctttggctttgctgtcactctgggcatcctcatcgctggccaggtctctggggcccacctgaaccctgccgtgacctttgccatgtgcttcctggctcgtgagccctggatcaagctgcccatctacaccctggcacagacgctgggagccttcttgggtgctggaatagtttttgggctgtattatgatgcaatctggcacttcgccgacaaccagctttttgtttcgggccccaatggcacagccggcatctttgctacctacccctctggacacttggatatgatcaatggcttctttgaccagttcataggcacagcctcccttatcgtgtgtgtgctggccattgttgacccctacaacaaccccgtcccccgaggcctggaggccttcaccgtgggcctggtggtcctggtcattggcacctccatgggcttcaactccggctatgccgtcaaccctgcccgggactttggcccccgcctttttacagcccttgcgggctggggctctgcagtcttcacgaccggccagcattggtggtgggtgcccatcgtgtccccactcctgggctccattgcgggtgtcttcgtgtaccagctgatgatcggctgccacctggagcagcccccaccctccaacgaggaagagaatgtgaagctggcccatgtgaagcacaaggagcagatctgagtgggcaggggccatctccccactccgctgccctggccttgagcatccactgactgtccaagggccactcccaagaagcccccttcacgatccaccctttcaggctaaggagctccctatctaccctcaccccacgagacagccccttcaggatttccactggaccttgcccaaatagcaccttaggccactgcccctaagctggggtggaaccggaatttgggtcaatacatccttttgtctcccaagggaagagaatgggcagcaggtatgtgtgtgtgtgcatgtgtgtgcatgtgtgtgcatgtgtgtgcaggggtgtgtgtgtgtggggggggttcccagatattcagggcaagggaccagtcggaagggattctggctattgggggagcccagagacaggggaaggcagcctgtccatctgtgcataaggagaggaaagttccagggtgtgtatgtttcaggggcttcacatggaggagctgcagatagatatgtgtttctgtgtatgtgtatgtctgcctttttttctaagtgggggcttctacaggcttttgggaagtagggtggatgtgggtagggctgggaggagggggccacagcttaggtttggagctctggatgtacatacataagtaggagcagtgggacgtgtttctgtcataatgcaggcatgaagggtggagtgaagtcaggtcataagtttcatgtttgcttttgttttgttttgtttttaatgtatgtagcagatgttacagtcttagggatccgggatgggagaccccactttagaaagggtcgtcactcctttaatcctctactcaacaatgtactcttttacttttatattaaaaaaaataaaataaatatgtgcctaaaaaaaaaaaaaaa

SEQ ID NO: 1656 - DNA, 3604 bp, Homo sapiens
gcttagcccaggcgcgggctgagagtcagttcgccaggtgggcctggagccatgggctgggtgggcgggcggcgccgggattctgcgtcaccacctgggcggagccgttctgctgctgacgacatcaacccggcacctgccaacatggaaggtggcggcggcagcgtcgctgtagctggcctcggagctcgaggctctggagcggctgcagctacagtccgggaacttctgcaggacgggtgttatagtgactttttaaacgaagactttgatgtaaagacttatacttctcaatctattcatcaagctgtaattgctgaacaactagcaaaacttgcccaaggaatcagtcagttggacagagaactacacttacaggttgttgcaagacatgaagatttactggcacaagcaactgggattgagtcgttggaaggtgttcttcagatgatgcagacgagaattggggctttacagggagctgttgataggataaaagcaaaaattgttgaaccatacaataagatagttgcccggactgcacaactagcaagacttcaggttgcctgtgatttgcttcggaggattattcgtatcttgaatctcagtaagagactccaaggacaactgcaagggggaagtagagagataacaaaagctgctcagagtctcaatgaacttgattatctttctcaaggaatagatctttctggaatagaagtgatagaaaatgatctactttttattgcaagagcccgacttgaagtggaaaatcaagctaagcgcctactagagcagggtttggagactcagaatccaactcaagtcggaacagctcttcaggttttctataatcttggaactttgaaggatactattaccagtgttgtggatggatattgtgctactttagaagaaaatatcaacagtgcattagacataaaagttttgactcagccttcccagtcagctgtgagagggggacctggacgatctaccatgccaaccccaggaaatactgcagctttgcgtgcctcactctggaccaatatggagaaacttatggatcatatttatgctgtttgtggacaggtacaacatctacaaaaagtattggccaagaagagagatcctgtttctcacatttgtttcattgaagaaatagttaaggatggacaaccggaaattttctacacattttggaattcagttactcaggcactttcttctcaatttcatatggcaacaaactcttcgatgtttttgaagcaggcatttgaaggagaataccctaaattattacgtctttataatgacttatggaagcgtcttcaacaatacagtcagcatatccaagggaattttaatgcaagtggaactacagacctctatgttgacctacaacacatggaagatgatgcacaagatatattcataccaaaaaagccagattatgatccagaaaaggctttgaaagactcactacaaccctatgaggctgcttatctatcaaaatccttatctcgactcttcgatcctatcaacttggtttttcccccgggtggtcgtaatcctccttcctctgatgaacttgatggtattattaaaactatagcaagtgaactaaatgttgctgctgttgatacaaacctcacattagctgtgtcaaaaaatgtggcaaagaccatccagttatacagtgtaaaatcagagcagcttctctccacacaaggagatgcaagtcaggtgattgggcctcttactgaaggacagagaagaaatgtggcagtagtgaattcattgtataagttgcaccaatcagtaacaaaggttgtttccagtcagagctcattcccactggcagctgagcaaactataatttcagctctaaaggctattcatgctcttatggaaaatgctgtgcaacccttactcacttctgtgggagatgctatagaggccataatcatcaccatgcatcaagaagacttttctgggtcattatccagctcaggaaaacctgatgttccttgttctctgtacatgaaggagctacaaggtttcattgccagagttatgagtgactattttaaacactttgaatgcttggattttgtctttgacaacactgaggctattgcccaaagagctgttgaactttttatccgccatgccagtctcataagacctcttggtgaaggtgggaaaatgcgacttgctgctgattttgcacagatggagttggctgtgggtccattctgtagacgagtatctgatttaggaaagtcctatcggatgctgagatcattcagacctctgctcttccaggcaagtgaacatgtagccagtagtcctgcattgggggatgtgattccgttcagcatcattattcagtttttgttcacgagagcacccgctgaactgaaatctcctttccagagggcagagtggtcccacacacgcttctctcagtggctggatgaccatccatctgaaaaggacaggctcctcctcatcaggggagccctggaagcttatgttcaatcagtgagaagtagagaaggcaaagaatttgcaccagtttatcccataatggttcagctgcttcaaaaggctatgtctgctcttcagtaatgacatgaaatctttgttcatctccactttgtgctaacccattcatagttggcagttaaacacatactccaaaagactgctactatctactattttaagaatgtaattgattgttcggtatttcctatcgacgtttatttacctctttagcacttatactttagcataaaaaatgttgagttatcaccacctttcaattccatggacctgatttttccagaaagatgttttcctctttcagatttttgtacaaggctaaaatgtctttcccatccataaccaagtcctcctatgggtacataaacccaaagtccccacttcttttaaagggatatgatcaagttataacatgtaccctgcttcccccaaccctgccttcttcactaaataagcatgtagctcagtggtttccaaatttggctgcacattcataccaatcaccaggggatttttttaaaatcctgatgcccaacttgcactccacattaattaacatgtctaggagtgggagcctgacagacaccactattaaaaaaaaaaaaaatccccaaaatgattccaatagacaacaaagttgaggaaccactggcacatcccaagctaagatacaaggttaaatggcctttttaagtatgtcatactggatctttaaataaagcaaggcttttgttacactttgtcatgttattaaaagcagacctttgggctgtttaaccgtgtaacaaaaatgccacgtgaaaaataaaaatttttattgtatagcaattctctataaatagtagataatctaagtccttattttctgatggctcttgttccactattaacattgtttttaatttttaaaatcctatcagcagcctcctaattagcagtgttaggaatttgccttatgttttccatctcatctcctgaacctgttattctgagaactcataaataaaattcagccaagattaatcaatcaatc

SEQ ID NO: 1657 - DNA, 1830 bp, Homo sapiens
cgaggccggaactggcggactgcggcgcacttccgtagaggtggacatggcgtgcggctttcgccgcgctattgcttgccagctttccagagtgttgaatcttccaccagaaaacttgatcacatcaatatctgcagttccaatttcccaaaaagaagaagtagctgattttcagctttctgtggattctttattggaaaaagacaatgaccattcaagaccagatattcaagttcaagccaagagactagcagagaagctaagatgtgatacagtggtgagtgaaatcagtactggtcaaaggactgtaaatttcaaaataaacagagagctcttaacaaagacagtgctacaacaagtaattgaagatggctcaaaatatggattaaaaagtgaacttttctctggacttccccagaagaagattgtggttgaattcagttcacctaatgttgccaaaaaatttcatgttggacatttgcgttctaccatcataggaaattttatagcaaatctcaaagaagctttaggacatcaagtaataagaataaattaccttggcgattggggcatgcagtttggtcttctgggaactggcttccagctgtttggctatgaggaaaaactgcagtccaatcctctacagcatctctttgaagtttatgtacaagttaataaagaagcagcagatgataaaagtgtagcaaaagcagcacaggagttcttccaacgattggaactgggcgatgtgcaagcactttcactgtggcaaaaatttcgggacttgagcattgaagagtacattcgggtttacaagcgtctgggagtatattttgatgaatattcaggagaatcattttatcgtgaaaaatctcaagaggtcttaaagttgctggagagtaaaggactcctactgagaacaataaaaggaacggctgtagtagatctctctgggaatggcgacccctcctcaatttgtactgtaatgcgaagtgatgggacttctctctatgcaaccagagatcttgcagctgctatagatcgaatggacaagtataattttgatacaatgatatatgtgacagataaaggacaaaaaaagcattttcagcaagtattccaaatgctgaagatcatgggatatgactgggcagaaaggtgccagcacgtgccctttggagtagtacagggaatgaagactcgaagaggagatgtcactttcctggaagatgttttaaatgagattcaattaaggatgctacagaacatggcttcaattaagacaactaaagaactcaagaacccacaagagactgcagagagggtcgggctcgcagcactcattattcaggacttcaaaggtttactcttatctgactacaagttcagctgggatcgtgttttccagagtcgcggggacacaggagtcttcctacagtacacacacgcccgcctccacagtttggaagagacttttggatgtgggtacctgaatgacttcaacactgcttgtttacaagagccacagtctgtttcaattcttcagcatcttctcaggttcgacgaggtgctttataaatcatctcaggactttcaacccaggcatatcgtcagttaccttctaactttaagtcatcttgcagctgtggcacacaaaacactacaaataaaagatagtcctcctgaagtggctggggccagacttcatcttttcaaagctgtccgttctgtcctagccaatggaatgaaacttcttggaataacacctgtatgtaggatgtaatttccattaaaatggcttttaaaatgtcaaaaaaaaaaaaaaaaaaa

SEQ ID NO: 1658 - DNA, 722 bp, Homo sapiens
cttgttcgtctcactggtgtgagctccagcatcccctttgctcgaaatggaccccaactgctcttgcgccactggtggctcctgcacgtgcgccggctcctgcaagtgcaaagagtgcaaatgcacctcctgcaagaagagtgagtgcggggccatctccaggaatctggggctgtggctcaggttgggagggaactcaaggctggccctgagtgcatccttctggggaactgggctttctttgccctcattgcccgtgtcattccctctccaggctttctgccctaaattcagatggggcaggacagcatttttctcgtgggacacaaaccccaactgtaccccctatggtttcagaacagagctgtgccagacgaaaaaaagcatcctctgggtctgggttctgagctcgagccaggcttgctattagggcagggaggtgcccggtcaagtctactgccacctctcactctccccttcttccccaggctgctgttcctgctgccccgtgggctgtgccaagtgtgcccagggctgcgtctgcaaaggggcatcggagaagtgcagctgctgtgcctgatgtgggaacagctcttctcccagatgtaaatagaacaacctgcacaacctggatttttttaaaaatacaacactgagccatttgctgcatttctttttatactaaatatgtgactgacaataaaaacaattttgactttaaa

SEQ ID NO: 1659 - DNA, 2608 bp, Homo sapiens
actcggagcagcgcgcgccccgcaatcgccgcagccgcccccgccgtcggccgccgcaccccaagcgactgcccaaactaagcctccgtggctgggtacgggagcgctttggggacaaaaattctccctcaactgtggtctgcattccttcggcccgtgggctgatctggggcgggaagtattagcgtctcagttgcgctgcagccggggaggaaggaggaggccgagcctggggcggagtttgggctgactggggctggaccgggcaagacgccgccgctgcccggatgttgcgatggctgatcgggggaggccgagaaccgcagggactggccgagaaatctcctttacagacaataggtgaagaacaaacccagaatccctacactgaactgctagtactgaaggctcatcatgatattgtacgatttctggtacagttagatgactacagatttgcatctgctggtgatgatggaattgtagttgtgtggaatgcccagacaggggaaaaacttttagaactgaatggacacactcaaaagataacagctattattacatttccttccttggaatcttgtgaagagaaaaatcaactcatcttgacagcctctgctgatagaacagttattgtgtgggatggtgatactaccagacaagttcagagaatatcatgcttccagtctactgtaaagtgtttaactgttcttcagagactagatgtttggctttctggtgggaatgacctgtgtgtgtggaaccgaaaattagatctcctgtgtaagactagccacctttctgatacaggtattagtgctttggttgaaatacctaagaactgtgttgtggcagcagttggcaaagaactgataattttcaggttggtagcacccacagaaggatcactagaatgggatattcttgaagttaagcgcctccttgatcaccaggataatattctctcattgattaatgtcaatgatttgagttttgtcaccggctcccacgtcggagagctgatcatctgggatgccctggactggaccatgcaggcctatgaacgcaacttctgggacccatctccacaactggacacccaacaagaaataaaactctgtcaaaaatcaaatgacatttctattcatcatttcacatgtgatgaagagaatgtatttgctgcagttggaaggggtttatacgtgtatagccttcaaatgaagcgtgtgattgcctgccagaaaactgcacatgactccaatgtcctgcacgttgccagacttccaaacaggcagttaatctcatgctcagaagatggcagtgtacgcatttgggagttaagagaaaaacagcagcttgcagctgagcctgtaccaacaggtttttttaacatgtggggatttggaagagtcagcaaacaagccagccaacctgttaaaaagcagcaagaaaatgctacttcatgttcactggagcttattggagatttgattggacactcatcatctgtggagatgtttctatactttgaagatcatggactagtgacgtgctccgctgatcatctcattattttgtggaaaaatggagagcgagaatctggattgcgcagtttaagattatttcaaaaattagaggagaatggtgacttataccttgctgtctagtttaaggaattaaaaatacacatgcatgaaccttgaacatcaaatatcgggtactactctgaaaaccattaatatattgatcacttaaattggtaattttttttgtcagtccataaaattctacatgtttaaattttttgtggacctaccaaccaggaacatgttgcttctcaggtcctagtatatcctccaaagaatataccacaagtttttccatttgactttgagctgctgttgaagtggtgagtgctgtgttttgagcttattttgaacctagatccttgtgaaaggtacaaatagaggtaatagttaagttatggcatttattagaagttttattatttggcttcctttagaattattgtgaagtttaaaaatagcctttctcctgcaaattttcctagtctttagtaactgttagtgttctatatagcacaaacttgaatctctcagccaaaaaagggaacatatatactgtttaagtatggcaagttttctttggtaccaatttgtttagataattttaaaaatgttttttagttctagctactaaaacctgtatgaactcaaatggataggcatcttgtgagggtgtgtttttcccagtgtgaattggcttgaagagccatgggctaaatgggtactagaacaacaactgcccctcatgtacgccaaggatgagctctagatcatttgagaggcacagtgtttccggagtcagggactgcagctgagcgcaactgccccatctgaccactgactcaaatacgaactgcttgagacagacttcttttatgtagttctttgcagtgtccattgagacactataaccagccttgtaacaatatgttttctccttttggtgctaaaaaataaaaatattagaaagtaaaaaaaaaaaaaaaaaaaaaaaaaaaaaaaaaaaaaaaaaaaaaaaaaaa

SEQ ID NO: 1660 - DNA, 884 bp, Homo sapiens; identical to SEQ ID NO: 1316

SEQ ID NO: 1661 - DNA, 8080 bp, Homo sapiens
acagcgctctcgacacggagcacccttctagcttcttcgtctccaggactgacgctcaggctcctctctcgccttagcccaacttgctttcccgcctcgcaaactccggtttccctccactcccaactcttttcactacacgtttcccctcctctatctcccacgccacgaaccccgatccccagactcctctctcccgccctcctccttcctctctcctcccttcaactcttcatccgcttccacctcagactctgcgcgcacccaattcagtcgcccgctcccgttcggctcctcgaagccatggcgggacctgggggctggagggacagggaggtcacggatctgggccacctgccggatccaactggaatattctcactagataaaaccattggccttggtacttatggcagaatctatttgggacttcatgagaagactggtgcatttacagctgttaaagtgatgaacgctcgtaagacccctttacctgaaataggaaggcgagtgagagtgaataaatatcaaaaatctgttgggtggagatacagtgatgaggaagaggatctcaggactgaactcaaccttctgaggaagtactctttccacaaaaacattgtgtccttctatggagcatttttcaagctgagtccccctggtcagcggcaccaactttggatggtgatggagttatgtgcagcaggttcggtcactgatgtagtgagaatgaccagtaatcagagtttaaaagaagattggattgcttatatctgccgagaaatccttcagggcttagctcaccttcacgcacaccgagtaattcaccgggacatcaaaggtcagaatgtgctgctgactcataatgctgaagtaaaactggttgattttggagtgagtgcccaggtgagcagaactaatggaagaaggaatagtttcattgggacaccatactggatggcacctgaggtgattgactgtgatgaggacccaagacgctcctatgattacagaagtgatgtgtggtctgtgggaattactgccattgaaatggctgaaggagcccctcctctgtgtaaccttcaacccttggaagctctcttcgttattttgcgggaatctgctcccacagtcaaatccagcggatggtcccgtaagttccacaatttcatggaaaagtgtacgataaaaaatttcctgtttcgtcctacttctgcaaacatgcttcaacacccatttgttcgggatataaaaaatgaacgacatgttgttgagtcattaacaaggcatcttactggaatcattaaaaaaagacagaaaaaaggaatacctttgatctttgaaagagaagaagctattaaggaacagtacaccgtgagaagattcagaggaccctcttgcactcacgagcttctgagattgccaaccagcagcagatgcagaccacttagagtcctgcatggggaaccctctcagccaaggtggctacctgatcgagaagagccacaggtccaggcacttcagcagctacagggagcagccagggtattcatgccactgcaggctctggacagtgcacctaagcctctaaaggggcaggctcaggcacctcaacgactacaaggggcagctcgggtgttcatgccactacaggctcaggtgaaggctaaagcctctaaacctctacaaatgcagattaaggcacctccacgactacggagggcagccagggtgctcatgccactacaggcacaggttagggcacctaggcttctgcaggtacagtcccaggtatccaaaaagcagcaggcccagacccagacatcagaaccacaagatttggaccaggtaccagaggaatttcagggtcaagatcaggtacccgaacaacaaaggcagggccaggcccctgaacaacagcagaggcacaaccaggtgcctgaacaagagctggagcagaaccaggcacctgaacagccagaggtacaggaacaggctgccgagcctgcacaggcagagactgaggcagaggaacctgagtcattacgagtaaatgcccaggtatttctgcccctgctatcacaagatcaccatgtgctgttgccactacatttggatactcaggtgctcattccagtagaggggcaaactgaaggatcacctcaggcacaggcttggacactagaacccccacaggcaattggctcagttcaagcactgatagagggactatcaagagacttgcttcgggcaccaaactcaaataactcaaagccacttggtccgttgcaaaccctgatggaaaatctgtcatcaaataggttttactcacaaccagaacaggcacgggagaaaaaatcaaaagtttctactctgaggcaagcactggcaaaaagactatcaccaaagaggttcagggcaaagtcatcatggagacctgaaaagcttgaactctcggatttagaagcccgcaggcaaaggcgccaacgcagatgggaagatatctttaatcagcatgaggaagaattgagacaagttgataaagacaaagaagatgaatcatcagacaatgatgaagtatttcattcgattcaggctgaagtccagatagagccattgaagccatacatttcaaatcctaaaaaaattgaggttcaagagagatctccttctgtgcctaacaaccaggatcatgcacatcatgtcaagttctcttcaagcgttcctcagcggtctcttttggaacaagctcagaagcccattgacatcagacaaaggagttcgcaaaatcgtcaaaattggctggcagcatcagaatcttcttctgaggaagaaagtcctgtgactggaaggaggtctcagtcatcaccaccttattctactattgatcagaagttgctggttgacatccatgttccagatggatttaaagtaggaaaaatatcaccccctgtatacttgacaaacgaatgggtaggctataatgcactctctgaaatcttccggaatgattggttaactccggcacctgtcattcagccacctgaagaggatggtgattatgttgaactctatgatgccagtgctgatactgatggtgatgatgatgatgagtctaatgatacttttgaagatacctatgatcatgccaatggcaatgatgacttggataaccaggttgatcaggctaatgatgtttgtaaagaccatgatgatgacaacaataagtttgttgatgatgtaaataataattattatgaggcgcctagttgtccaagggcaagctatggcagagatggaagctgcaagcaagatggttatgatggaagtcgtggaaaagaggaagcctacagaggctatggaagccatacagccaatagaagccatggaggaagtgcagccagtgaggacaatgcagccattggagatcaggaagaacatgcagccaatataggcagtgaaagaagaggcagtgagggtgatggaggtaagggagtcgttcgaaccagtgaagagagtggagcccttggactcaatggagaagaaaattgctcagagacagatggtccaggattgaagagacctgcgtctcaggactttgaatatctacaggaggagccaggtggtggaaatgaggcctcaaatgccattgactcaggtgctgcaccgtcagcacctgatcatgagagtgacaataaggacatatcagaatcatcaacacaatcagatttttctgccaatcactcatctccttccaaaggttctgggatgtctgctgatgctaactttgccagtgccatcttatacgctggattcgtagaagtacctgaggaatcacctaagcaaccctctgaagtcaatgttaacccactctatgtctctcctgcatgtaaaaaaccactaatccacatgtatgaaaaggagttcacttctgagatctgctgtggttctttgtggggagtcaatttgctgttgggaacccgatctaatctatatctgatggacagaagtggaaaggctgacattactaaacttataaggcgaagaccattccgccagattcaagtcttagagccactcaatttgctgattaccatctcaggtcataagaacagacttcgggtgtatcatctgacctggttgaggaacaagattttgaataatgatccagaaagtaaaagaaggcaagaagaaatgctgaagacagaggaagcctgcaaagctattgataagttaacaggctgtgaacacttcagtgtcctccaacatgaagaaacaacatatattgcaattgctttgaaatcatcaattcacctttatgcatgggcaccaaagtcctttgatgaaagcactgctattaaagtatgcattgatcaatcagcagactctgaaggagactacatgtcctatcaagcctatatacgaatactggcaaaaatacaggcagctgatccagtgaaccggtttaagagaccagatgagctccttcatttgctgaagctcaaggtatttccaacacttgatcataagccagtgacagttgacctggctattggttctgaaaaaagactaaagattttcttcagctcagcagatggatatcacctcatcgatgcagaatctgaggttatgtctgatgtgaccctgccaaagaatcccctggaaatcattataccacagaatatcatcattttacctgattgcttgggaattggcatgatgctcaccttcaatgctgaagccctctctgtggaagcaaatgaacaactcttcaagaagatccttgaaatgtggaaagacataccatcttctatagcttttgaatgtacacagcgaaccacaggatggggccaaaaggccattgaagtgcgctctttgcaatccagggttctggaaagtgagctgaagcgcaggtcaattaagaagctgagattcctgtgcacccggggtgacaagctgttctttacctctaccctgcgcaatcaccacagccgggtttacttcatgacacttggaaaacttgaagagctccaaagcaattatgatgtctaaaagtttccagtgatttattaccacattataaacatcatgtataggcagtctgcatcttcagatttcagagattaaatgagtattcagttttatttttagtaaagattaaatccaaaactttacttttaatgtagcacagaatagttttaatgagaaatgcagctttatgtataaaattaactatagcaagctctaggtactccaatggtgtacaatgtcttttgcacaaactttgtaacttttgttactgtgaattcaaacattactctttggacagtttggacagtatctgtattcagattttacaacatggagtaaagaaacctgttatgaattagattacaagcagccttcaaaagaattggcactgggataagatttttcagaaaaagaaaaacatcggcaaactgtgtgtgatttttccaaagctatataaagaaccaaaggtttagtcaagaaacaaaaatcttaaagattattataacccagactaaggttgaacaacctgcatgcccagagaaaactatggcgacaaaggggaaaaggccaccactcgttttctcactgattcatgccaattaagcctacagttaaagaccagttttgttcttttcacccatttttaagctggttttctcctgataagaagaaaggaagaaagccccagacgcttggtttttctcagaacccccaaaagatgtgcaatagctgttgttacaaaccaccaaataatacagttgtgagcctgaatacaggactgaactcctatacacgtgtactgtagaatgagtattttttaataccttaaggtaggcgtcaaattctactccccaaagcagagatagattgatttatcaaaattattatctggccaacagtgtgactatcagacagcatcaaatatttgcccaatccaagattagactacacaaaagcttccttccagtattaaacaaaaagaattaaacataactatgaaaaaactttgctaatatctgtgtttttcagatttcattttttgtaaaatcagaaattaatctaaacatattcagtgataagttcatgtgtaacgacttaatgttaaaggttaaaaaaaagatttcacaaaatatacaactttcaccatatatataagcctgcaaaattagagtagtgaaagtcatgctagtccatcacccaaatatgttatagacgccatagacaggtgatgtttggtcacctatggtaactgctacctgatgaagagcataatttctgcatatccatcctcaataccatggtaaattctggggcaatagagaagcaacagaactgccacaaagtatacctcaatataattcctctagttctgcttctaaaatctgaggacagtgctagtgggaaaataattttcaaactacctggttaaccaaaatacaaaagcagctgactatgtgtgatttcataatagcacatttcttgacacttagtgctagaaatgaagatttggattttcctaacaacttacatcaagaatgtagtgtagctcattattgagaatttaggaaagcctgaatccattaattaaggaaataaatgtgactcacatttcttttactgtgacacaataatgtgatcctaaaactggcttatccttgagtgtttacaactcaaacaactttttgaatgcagtagttttttttttttaaaaacaaacttttatgtcaaattttttttcttagaagtagtcttcattattataaatttgtacaccaaaaggccatggggaactttgtgcaagtacctcatcgctgagcaaatggagcttgctatgttttaatttcagaaaatttcctcatatacgtagtgtgtagaatcaagtcttttaataattcattttttcttcataatatttactcaaagttaagcttaaaaataagttttatcttaaaatcatatttgaagacagtaagacagtaaactattttaggaagtcaacccccattgcactctgtggcagttattctggtaaaaataggcaaaagtgacctgaatctacaatgatgtcccaaagtaaccaagtaagagagattgtaaatgataaaccgagctttaaaggataaagtgttaataaagaaaggaagctgggcacatgtcaaaaagggagatcgaaatgttaggtaatcatttagaaaggacagaaaatatttaaagtggctcataggtaatgaatatttctgacttagatgtaaatccatctggaatctttacatcctttgccagctgaaacaagaaagtgaagggacaatgatatttcatggtcagtttattttgtaagagacagaagaaattatatctatacattaccttgtagcagcagtacctggaagccccagcccgtcacagaagtgtggaggggggctcctgactagacaatttccctagcccttgtgatttgaagcatgaaagttctggcaggttatgagcagcactagggataaagtatggttttattttggtgtaatttaggtttttcaacaaagcccttgtctaaaataaaaggcattattggaaatatttgaaaactagaaaatgatggataaaagggctgataagaaaatttctgactgtcagtagaagtgagataagatcctcagaggaaacagtaagaagggataatcattaagatagtaaaacaggcaaagcagaatcacatgtgcacacacacatacacatgtaaacattggaatgcataagttttaatattttagcgctatcagtttctaaatgcattaattactaactgccctctcccaagattcatttagttcaaacagtatccgtaaactaggaataatgccacatgcattcaatgggatcttttaagtactcttcagtttgttccaagaaatgtgcctactgaaatcaaattaatttgtattcaatgtgtacttcaagactgctaattgtttcatctgaaagcctacaatgaatcattgttcaaccttgaaaaataaaattttgtaaaacaaaaaaaaaaaaaaaaaaa

SEQ ID NO: 1662 - DNA, 2319 bp, Homo sapiens
aggcgcggctttcaggccaacatggccgtgctgctgctgctgctccgtgccctccgccggggtccaggcccgggtcctcggccgctgtggggcccaggcccggcctggagtccagggttccccgccaggcccgggagggggcggccgtacatggccagcaggcctccgggggacctcgccgaggctggaggccgagctctgcagagcttacaattgagactgctaacccctacctttgaagggatcaacggattgttgttgaaacaacatttagttcagaatccagtcagactctggcaacttttaggtggtactttctattttaacacctcaaggttgaagcagaagaataaggagaaggataagtcgaaggggaaggcgcctgaagaggacgaagaggagaggagacgccgtgagcgggacgaccagatgtaccgagagcggctgcgcaccttgctggtcatcgcggttgtcatgagcctcctgaatgctctcagcaccagcggaggcagcatttcctggaacgactttgtccacgagatgctggccaagggcgaggtgcagcgcgtccaggtggtgcctgagagcgacgtggtggaagtctacctgcaccctggagccgtggtgtttgggcggcctcggctagccttgatgtaccgaatgcaggttgcaaatattgacaagtttgaagagaagcttcgagcagctgaagatgagctgaatatcgaggccaaggacaggatcccagtttcctacaagcgaacaggattctttggaaatgccctgtactctgtggggatgacggcagtgggcctggccatcctgtggtatgttttccgtctggccgggatgactggaagggaaggtggattcagtgcttttaatcagcttaaaatggctcgtttcaccattgtggatgggaagatggggaaaggagtcagcttcaaagacgtggcaggaatgcacgaagccaaactggaagtccgcgagtttgtggattatctgaagagcccagaacgcttcctccagcttggcgccaaggtcccaaagggcgcactgctgctcggcccccccggctgtgggaagacgctgctggccaaggcggtggccacggaggctcaggtgcccttcctggcgatggccggcccagagttcgtggaggtcattggaggcctcggcgctgcccgtgtgcggagcctctttaaggaagcccgagcccgggccccctgcatcgtctacatcgatgagatcgacgcggtgggcaagaagcgctccaccaccatgtccggcttctccaacacggaggaggagcagacgctcaaccagcttctggtagaaatggatggtgcctctcttgaccagctaccctcccaggggaccatgaggaagctcagaggaaagacccccgcctgctcctgtctcacggagcccacagggtcacggagggcaatggagggtcattcgctctgctggggttgccttttgcactgaagatagagaccacctttttgagtgacttgagcccaaaggcaagcgtatatcaaacgatcttctccacataacctctctgtgccatcataagaatagctgcttccgcccccggatttgctcaggcctgggaatccgctgactgaaggcctcttgttgagtgccagctctaaacaagtccctttatgcagagccacagctgtgcatgctcagccctgccgaggtcccaggccaggctttgttgcttccgttcatggaagcgcacaggatagggccgacgctgtgccggtcgtggggaaatctcactggggaagagaaaagcccaagccttgttggttacgtcagccggtccatggcggtgtcctgcggaccccagagcccccgggaagggcgcaagtcaaagagcactggaggcaccgccggcgatggacgtccaggtcccggctcctgtgctggaaagcgttgatggggagcgtcggcgctgaccacacgcgggagctgcggaagcccagcggttcacacaggcctcccttcaacgtagtcatcccctggtggtggaagcaagacgacggcccctgacgtgcagccacacacagaaaaggctgctgtgaacattttatgcttcgactttttttttcttcagagacagggtgtcgttctgtcgcccaggctggagtgcagtgccaccatcatagctcactgcagcctccacctcctaggctcaagcttcctaagtagttgggactcaaggcttgagtcaccatgccaggctctgttttttcagtctgtgaaaaataaagtcatcagcatgtgaaaaaaaaaaaaaaaaaa

SEQ ID NO: 1663 - DNA, 10491 bp, Homo sapiens; identical to SEQ ID NO: 1369

SEQ ID NO: 1664 - DNA, 1451 bp, Homo sapiens; identical to SEQ ID NO: 1085

SEQ ID NO: 1665 - DNA, 1987 bp, Homo sapiens
gcagacttagccgtgcattgcaggcatggaggattaatcagtgacaggaagctgcgtctctcggagcggtgaccagctgtggtcaggagagcctcagcagggccagccccaggagtctttcccgattcttgctcactgctcacccacctgctgctgccatgaggcaccttggggccttcctcttccttctgggggtcctgggggccctcactgagatgtgtgaaataccagagatggacagccatctggtagagaagttgggccagcacctcttaccttggatggaccggctttccctggagcacttgaaccccagcatctatgtgggcctacgcctctccagtctgcaggctgggaccaaggaagacctctacctgcacagcctcaagcttggttaccagcagtgcctcctagggtctgccttcagcgaggatgacggtgactgccagggcaagccttccatgggccagctggccctctacctgctcgctctcagagccaactgtgagtttgtcaggggccacaagggggacaggctggtctcacagctcaaatggttcctggaggatgagaagagagccattgggcatgatcacaagggccacccccacactagctactaccagtatggcctgggcattctggccctgtgtctccaccagaagcgggtccatgacagcgtggtggacaaacttctgtatgctgtggaacctttccaccagggccaccattctgtggacacagcagccatggcaggcttggcattcacctgtctgaagcgctcaaacttcaaccctggtcggagacaacggatcaccatggccatcagaacagtgcgagaggagatcttgaaggcccagacccccgagggccactttgggaatgtctacagcaccccattggcattacagttcctcatgacttcccccatgcgtggggcagaactgggaacagcatgtctcaaggcgagggttgctttgctggccagtctgcaggatggagccttccagaatgctctcatgatttcccagctgctgcccgttctgaaccacaagacctacattgatctgatcttcccagactgtctggcaccacgagtcatgttggaaccagctgctgagaccattcctcagacccaagagatcatcagtgtcacgctgcaggtgcttagtctcttgccgccgtacagacagtccatctctgttctggccgggtccaccgtggaagatgtcctgaagaaggcccatgagttaggaggattcacatatgaaacacaggcctccttgtcaggcccctacttaacctccgtgatggggaaagcggccggagaaagggagttctggcagcttctccgagaccccaacaccccactgttgcaaggtattgctgactacagacccaaggatggagaaaccattgagctgaggctggttagctggtagcccctgagctccctcatcccagcagcctcgcacactccctaggcttctaccctccctcctgatgtccctggaacaggaactcgcctgaccctgctgccacctcctgtgcactttgagcaatgccccctgggatcaccccagccacaagcccttcgagggccctataccatggcccaccttggagcagagagccaagcatcttccctgggaagtctttctggccaagtctggccagcctggccctgcaggtctcccatgaaggccaccccatggtctgatgggcatgaagcatctcagactccttggcaaaaaacggagtccgcaggccgcaggtgttgtgaagaccactcgttctgtggttggggtcctgcaagaaggcctcctcagcccgggggctatggccctgaccccagctctccactctgctgttagagtggcagctccgagctggttgtggcacagtagctggggagacctcagcagggctgctcagtgcctgcctctgacaaaattaaagcattgatggcctgtggacctgcaaaaaa

SEQ ID NO: 1666 - DNA, 4716 bp, Homo sapiens
gaagaactggaactggtctggccatagggggaagcggcgcgttaaatccgccccctctccataccctactttcaaggggtgggcggtagaggggaggttggggttggagcagcggcgagggggcccctcccttgcacctccccccaccggacttggtcgcgcccgaagtgtaacactttctctttgtcggaggagctcctctgtttcctgtgcagtagctcccgttgcggcggcacccgtggcagccctggcggacgcaggagcgatggcagcgaccgatatagctcgccaggtgggtgaaggttgccgaactgtccccctggctggacatgtggggtttgacagcttgcctgaccagctggtgaataagtccgtcagccagggcttctgcttcaacatcctgtgcgtgggagagacaggtttgggcaagtccaccctcatggacaccctgttcaacaccaaattcgaaggggagccagccacccacacacagccgggtgtccagctccagtctaatacctatgacctccaagagagcaacgtgaggctaaagctcacgatcgttagcacagttggctttggggaccagatcaacaaagaggacagctacaagcctatcgtggaattcatcgatgcacaattcgaggcctacctgcaggaagagctaaagatccgaagagtgctacacacctaccatgactcccgaatccatgtctgcttgtatttcattgcccccacgggtcattccctgaagtctctggacctagtgactatgaagaagctggacagtaaggtgaacatcatccccatcattgccaaagcagatgccatttcgaagagtgagctaacaaagttcaaaatcaaaatcaccagcgagcttgtcagcaacggagtccagatctatcagtttcctacagatgatgagtcggtggcagagatcaatggaaccatgaacgcccacctgccgtttgctgtcattggcagcacagaagaactgaagataggcaacaagatgatgagggcgcggcagtatccttggggcactgtgcaggttgaaaacgaggcccactgcgactttgtgaagctgcgggagatgctgattcgggtcaacatggaggatctgcgggagcagacccacacccggcactatgagctgtatcgccgctgtaagctggaggagatgggcttcaaggacaccgaccctgacagcaaacccttcagtttacaggagacatatgaggccaaaaggaacgagttcctaggggaactccagaaaaaagaagaggagatgagacagatgttcgtccagcgagtcaaagagaaagaagcggagctcaaagaggcagagaaagagctgcacgagaagtttgaccgtctgaagaaactgcaccaggacgagaagaagaaactggaggataagaagaaatccctggatgatgaagtgaatgctttcaagcaaagaaagacggcggctgagctgctccagtcccagggctcccaggctggaggctcacagactctgaagagagacaaagagaagaaaaattaactctgctgtttgctgcatgctgcatgagacccagggtcctgtttgggcttcctgtagacacccttttcctgcgcaacagagctgggcctccctttctctaatttcccccttaacatgcctggggggcatacaatccaacccgcgccctctcctctcttcctgccaaggtttatagaaacctgagaatctgagggtgatgtctggccgctggtcaagaagccaacagtcatgtggctcgcagatgcatcctgcatcccagtccccctcccagcacccccagccatcccccctgtcttcccccacatctttgccagaggtgtgacatggtcagggggcccatctgctactctttcccaccagctcccctgttccagttctggttgctgttagtttccctgaggtatttgcaaccaccatggctgggtaaccaccgatcagcacagctgtccccttggtctcctgtatcccagtcactagtcctccctggtccaccccaccctcatcctcaggagccacagccatttcttagagggtttcaaaaggacagcctttggcgccttttccttctaacctttgagtccagccctttccagttttcattcactcgaagtaactgcactcaagctgtgctcaaaatcggcaacgcatttatttacaccaagcccttcccataaaacacaactgctgaagaaaatagcagacgtttcccctctctctaactctgggtatcccacagatgcaaaagggagaataaacctgaatattattaccagcctagagtcttgaatgatagccttaccgaattcttcttgtgaggtatttcagcatctcggggggtaatttccggaagggctccatactgtcccaataaggtgaggccagtagcaggaataataaatcccactttgtaggctggaaaactgagctgtcaaaagaatcaagtgtttgggggtttgctctgatgagtcttctagttcatttggtgaatgtcatgatgatttttaacatgcattttgcatgcatcccccaataagaagagatgagactcggctggagagaagaaaaggcccttaactttctttccaatttaaggagttgagagtttaaaaatattccagccctaagtttttatcatgggtcccatctgatagtggctttgggaacctctgtgaagtagagagccctcccttgtcagggttatgaggcacagtggcctttggtgtttggccagtgacagtgtgagagatggagttgacctggcaatgatctgtggctaacatgccgtctctctgcccttcctttgcagtaatccatggctgtgtactgaatagtattccccgctacagctggactggactccatttagccttttaagccgaggttcctattttaactgacagctttcctttggggtgccaggcagcgaggccccccacccctatcctgccatgtacttcaagctcacttcttctttttgagttccgcaacttgctcctgcctcccagccccactggcactgaccatgaccacctacttctattttttttttagagtttctttttttgatcacttactttcaaagcacacagtcaaacaaggttatgccaaatttccaggcctttttgaagtattgagaaggggaaggggatttctcacttcaattatagatcataataggaagcaaaaagaaaaaaatgaaaagcaaacatatgcacgcacttttcttgttgacaaagcaagaatataggtttgctgtgtaggtttggtgctctattgattggtgagtgaccagagcaagtatgaaggtgatgctgccaaagcacaagccagtttcttgggaaaattcaagttacagtggagtatttttttgaagaccatatgcttggaggtagaaacaaaccaacgaccaaaaaaaaaaaaaaaaaaatctgctcagatactcagccagtagctcagagagatgctgagttaggcctgtcaggtctccttgggaaaggcttcatatttgcaactttgatgattctatgtccagcttcagagctgctttcccagaaattcacgcttaaacaaccaaccggtaaccaccacttccccacaccgccgcccggtaattatttgcattacaaaccggaggcgccctcatttgcatttgtgtacagattaactagttaaggcttgagaagctctgaataattcaaaagtattagacccacacagccttggagagaccttcagaaactaaggaggagttttatattaagggagacattttagtcagtaagacgatataacctacttactccgtaaggggaaatgaaggcccagagaagggaagggacttgaccgaggtcccacttctgtttcgaggcagaagccagactaattttcatgcctcctgactcccaatcagtttcacaaagggattcaatctgtttatatacgttacattcctggatacgaggtcttttgatgttcagagtaactgactagttagtattagaagaccctcgaggtttttttccacagaaaaacatctgaagatggattgggtgagggctggcaaaacgaaggcatgccgggccagctccttaacccaatgacccagtgatgctgcaaggctggaacggggtccaggagactgtgtgtaacaggtgccctaggtgacccttataatcagggaagtttggtgaacaaaaatcgaacccatgagtgaacataaattaaaaagttgatcaacctattaaaatgtgtatttcattgggtagcttttctcactgtagacagattttttccttcttcaatgaaaaggcttttaaattagtacaactgttactatttaaaaaaaaaataccctaagtactctgtttacttctggtgaaacaaaaccagtcattagaaatggtctgtgcttttattttcccagactggagtggcttttctgaaacacacacacacacacacacacacacacacacacacacacacacacacacgtacacacatccctcacttctcttaagccaagaagtttgctttccctagctgcagtgtagatggctcttgtttttgtttttttgttttaatcatttggcattcacatgtggctgttaatatgtgcttgtttttaattaaaacaagaagctttaaaaaaaaaaaaaaaaaaaaaa

SEQ ID NO: 1667 - DNA, 1432 bp, Homo sapiens
ggggcgtgctcgcggctataaggggcggaggctgggcggcgttgctctgcgctctgcggctgacggcgcttttgtctccggtgagttttgtggcgggaagcttctgcgctggtgcttagtaaccgactttcctccggactcctgcacgacctgctcctacagccggcgatccactcccggctgttcccccggagggtccagaggcctttcagaaggagaaggcagctctgtttctctgcagaggagtagggtcctttcagccatgaagcatgtgttgaacctctacctgttaggtgtggtactgaccctactctccatcttcgttagagtgatggagtccctagagggcttactagagagcccatcgcctgggacctcctggaccaccagaagccaactagccaacacagagcccaccaagggccttccagaccatccatccagaagcatgtgataagacctccttccatactggccatattttggaacactgacctagacatgtccagatgggagtcccattcctagcagacaagctgagcaccgttgtaaccagagaactattactaggccttgaagaacctgtctaactggatgctcattgcctgggcaaggcctgtttaggccggttgcggtggctcatgcctgtaatcctagcactttgggaggctgaggtgggtggatcacctgaggtcaggagttcgagaccagcctcgccaacatggcgaaaccccatctctactaaaaatacaaaagttagctgggtgtggtggcagaggcctgtaatcccagctccttgggaggctgaggcgggagaattgcttgaacccggggacggaggttgcagtgagccgagatcgcactgctgtacccagcctgggccacagtgcaagactccatctcaaaaaaaaaagaaaagaaaaagcctgtttaatgcacaggtgtgagtggattgcttatggctatgagataggttgatctcgcccttaccccggggtctggtgtatgctgtgctttcctcagcagtatggctctgacatctcttagatgtcccaacttcagctgttgggagatggtgatattttcaaccctacttcctaaacatctgtctggggttcctttagtcttgaatgtcttatgctcaattatttggtgttgagcctctcttccacaagagctcctccatgtttggatagcagttgaagaggttgtgtgggtgggctgttgggagtgaggatggagtgttcagtgcccatttctcattttacattttaaagtcgttcctccaacatagtgtgtattggtctgaagggggtggtgggatgccaaagcctgctcaagttatggacattgtggccaccatgtggcttaaatgattttttctaactaataaagtggaatatatatttctaaaaaaaaaaaaaaaaaaaaa

SEQ ID NO: 1668 - DNA, 21283 bp, Homo sapiens; identical to SEQ ID NO: 59

SEQ ID NO: 1669 - DNA, 1551 bp, Homo sapiens
ggcgcccaagccgccgccgccagatcggtgccgattcctgccctgccccgaccgccagcgcgaccatgtcccatcactgggggtacggcaaacacaacggacctgagcactggcataaggacttccccattgccaagggagagcgccagtcccctgttgacatcgacactcatacagccaagtatgacccttccctgaagcccctgtctgtttcctatgatcaagcaacttccctgaggatcctcaacaatggtcatgctttcaacgtggagtttgatgactctcaggacaaagcagtgctcaagggaggacccctggatggcacttacagattgattcagtttcactttcactggggttcacttgatggacaaggttcagagcatactgtggataaaaagaaatatgctgcagaacttcacttggttcactggaacaccaaatatggggattttgggaaagctgtgcagcaacctgatggactggccgttctaggtatttttttgaaggttggcagcgctaaaccgggccttcagaaagttgttgatgtgctggattccattaaaacaaagggcaagagtgctgacttcactaacttcgatcctcgtggcctccttcctgaatccctggattactggacctacccaggctcactgaccacccctcctcttctggaatgtgtgacctggattgtgctcaaggaacccatcagcgtcagcagcgagcaggtgttgaaattccgtaaacttaacttcaatggggagggtgaacccgaagaactgatggtggacaactggcgcccagctcagccactgaagaacaggcaaatcaaagcttccttcaaataagatggtcccatagtctgtatccaaataatgaatcttcgggtgtttccctttagctaagcacagatctaccttggtgatttggaccctggttgctttgtgtctagttttctagacccttcatctcttacttgatagacttactaataaaatgtgaagactagaccaattgtcatgcttgacacaactgctgtggctggttggtgctttgtttatggtagtagtttttctgtaacacagaatataggataagaaataagaataaagtaccttgactttgttcacagcatgtagggtgatgagcactcacaattgttgactaaaatgctgcttttaaaacataggaaagtagaatggttgagtgcaaatccatagcacaagataaattgagctagttaaggcaaatcaggtaaaatagtcatgattctatgtaatgtaaaccagaaaaaataaatgttcatgatttcaagatgttatattaaagaaaaactttaaaaattattatatatttatagcaaagttatcttaaatatgaattctgttgtaatttaatgacttttgaattacagagatataaatgaagtattatctgtaaaaattgttataattagagttgtgatacagagtatatttccattcagacaatatatcataacttaataaatattgtattttagatatattctctaataaaattcagaattct

SEQ ID NO: 1670 - DNA, 2643 bp, Homo sapiens
aattcggcgtcggactctgcgccccgcgtagttccggtggcgactgcggcgcatggcggccctgggacatcttgctggggaggcagcggcggccccaggcccgggtactccctgcgcgtcccgcggagcccggcttcccggcccagtttccagcgcccggaatccttccactgtctgtctctgcccagagcaacctacgtgcagtaacgctgactccagagcgcacccgttgggcgatgaaggcggcacagcgtcgaaaaaacaaaagaataagaagaaaacgcggaacagggcctctgtggcaaatggaggcgagaaggcctcagagaaactcgccccagaagaagttcccctaagcgctgaggcccaggcacaacagttggcccaggaattggcttggtgtgtggagcaactggagctgggcctcaagaggcagaaacccaccccgaaacagaaagagcaggctattggagcaatccgaaccctgcgcagcaaaagaacgcccttgccccggaagaggcagctgatgcactccttgtttggagactatagggctcagatggaagccgaatggcgtgaggccctgcgggctctcagagctgctgcttattcagcccaggtgcaacctgtagatggagccaccagaaagaagagccaaagggtctgcaggcctcgctctatatggagagccaaagccactctggacatgcctgatgaagagtttaggttcaatttcttttagcgtctccccgaacctgaaacaatccccctcccttggggtggtgtaggggtttgttttgagtgcagagcctttccaggacttctgttgtcagagaaccctggagttggtctgtccctggctggtccaaggatttgtagctgttgtgaaggtgtgagaccatcagataggcaaaagaccccgttcgttttctgatgaaatgttctctctttcagaagagagagagaggtgcatttagaaaatatgcaataaattgaagtgagtgttcaaagtattgtagaaggaatattgtactcagtctttaggattagattaagtggctgttggtaacaaagattagtggagaagctgtataatcgtacactggttttcacttttgaaaggaatccctgtcaaatggtttagtgcttaatgctgttatgtcatattgccctaatctctatttttgataaaattggataaggagtgaaagagtatgctgaccacctatgttagaggaagtacagaagatgcaggggtgtggtatccctgggtccagtccctcacctggtacctttgcgcatgttgccttcattcctgagcaggtatcatcctcagggaaccagcatggcacctaccaggccaggctctgttcttaggagcaaggagcttcttgcgctaacagttctggcctgagacctggattgagccttggcagacttcttgtctaaatgttggccattcagtctcaggccctctgttccatggaattgggaatctccaggtgacctaatcctcattggtggcttgatgtttgctggtatcttccaaactcagttcccagactagattgatacctggagcccagctgcctactcagcatttccacttgggtgcttcataggcatttcaaacctgatgtgtttaaaacacttgattaggctccggttttcctttggcttctgcttttcagtgaatggcatgactgcctatgtgggtggcaagccacccaggtgccgaggaaagagactgagggcacgagctgttccagtataataaaatatataaaataagaagagttatactagatccagatcatagacatgattatatgtgagtatcattaatcattagtttatagcaattactctttattccaatattataataatcctcaccctacaatcataacctaggaaaaaccaggccatacagagataggagccgaggggacatagtgcgaagtggccagaagacaagagtgtgagccttctcttatgcctggacagggccaccagagggcttggtctagcagtaacaccagtgtctgggaagatgcctgttgcaaagtggaccatggtctagcagtagcatcagtgtcaaggaaaaacacccactacttagcagactgggaaaaggagcctccctttccccgggggagtttagagaagactactcctccacctcttgtggagggcctgacatcagtcaggcccgcccgcagttatccagaggcctgtctccctgtgatgctgtgcttcagtggtcacgctcctagtccgctttcatgttccatcctgtatacctggctctgccttttagatagcaggagcaaattagtgaaagtactaaatgtctgatatgcagaaataatggcataagctgtctctctctcttctctctctctctgcctctgctgccaggcagggaagggccccctgtccagtggacacatgacccatgtgaccttacctattattggagatggttcacattccttaccctgcccctttgtcttatatccaataaatatcagtgcagcctggcatttggggccactactggtctccgcgtcttggtggtagtggtcccccaggcccaggtgtcttttcttttaaaaaaaaaaaaaaaaaaaaaaaaaaaaa

SEQ ID NO: 1671 - DNA, 2967 bp, Homo sapiens
tagctccgcgcgggggcttcctcggctccttgctgttgccgccgccgcagctgctgccgcggttggtggggttgggtgagaggaggagctgtcgcggaccctgtagagtcggtctctgttgctctttttgcctgaggagtcttccatcctacgtcgagctctgactcccgtgctgtcgagagggagtccccggggacacctcggcacgcagcggagatgcctctttttgccaccaatcccttcgatcaggatgttgagaaagcaaccagcgagatgaatactgctgaggactggggcctcattttggatatctgtgataaagttggtcagtctcgcactggacctaaggattgtcttcggtctattatgagaagagtgaaccacaaagatcctcacgttgctatgcaggctttgactcttctaggagcatgtgtatcaaactgtggcaaaatttttcatttagaagtatgttcaagagattttgctagtgaagtaagcaacgtattaaataagggtcatcctaaagtatgtgaaaaattaaaggctcttatggttgaatggacagatgaatttaagaatgatccacagcttagtctaatatcagcaatgattaagaaccttaaggaacaaggagttacgttcccagctattggctctcaggctgcagaacaagcaaaagcaagcccagctcttgtagccaaggatcctggtactgtggctaacaaaaaagaagaagaagatttagcaaaagccattgagttgtctctcaaggaacaaaggcagcagtcaaccaccctttccactttgtatccaagcacatccagtctcttaactaaccaccaacatgaaggccgaaaagttcgtgctatatatgactttgaagctgctgaagacaatgaacttacttttaaagctggagaaattattacagttcttgatgacagtgatcctaactggtggaaaggtgaaacccatcaaggcatagggttatttccttctaattttgtgactgcagatctcactgctgaaccagaaatgattaaaacagagaagaagacggtacaatttagtgatgatgttcaggtagagacaatagaaccagagccggaaccagcctttattgatgaagataaaatggaccagttgctacagatgctgcaaagtacagaccccagtgatgatcagccagacctaccagagctgcttcatcttgaagcaatgtgtcaccagatgggacctctcattgatgaaaagctggaagatattgatagaaaacattcagaactctcagaacttaatgtgaaagtgatggaggccctttccttatataccaagttaatgaacgaagatccgatgtattccatgtatgcaaagttacagaatcagccatattatatgcagtcatctggtgtttctggttctcaggtgtatgcagggcctcctccaagtggtgcctacctggttgcagggaacgcgcagatgagccacctccagagctacagtcttcccccggagcagctgtcttctctcagccaggcagtggtcccaccatccgcaaacccagcccttcctagtcagcagactcaggccgcttacccaaatacaatggtcagttccgttcaaggaaacacatatcccagccaggcgccagtatatagtcctcctcctgccgctactgctgctgctgcaactgccgatgtcactctgtaccagaatgcaggacctaatatgccccaggtgccaaactataacttaacatcatcaactctgcctcagcccggaggcagccaacagccacctcagccacagcaaccatattctcagaaggctctgctataggacccggtgttcctcttggtggcagatacctgctaaatgccactgacaatgttatgagattcattactatcttaagatgtgtttatcctcagcttataggaatctctccaggtcaacaggttcaaatattcaagaaggtagaactctcctcaatttacactgactttttagaggttcttccccccccgcccctgcagaggaatgaaactacttacaacatttaattcctttcataatatgaaagaattgatacaaggctatttgtctcgtaaacctggtctgcagaaagtcaaacttacaaaaactgttgtgacaaatgttatgtacatatattgatatgtaactgcattagtggccattttgaatcacagtggtgatcgtgtgaatatatttaacactgtgttaaattaatttacgttgctattttattttaatcataaacaactaccatgtttcttaatgttttgtgtaaatttaaggtaattatactatccttttaaacttcaagaaaacaaagttgttagcgtatttacatgaaggcgcattatgttgtcgtgtgtttcagtttcacattaaactgaaccttttactaattgtgagctaaagagatatatatatatatgtgtgtgtatatatatatatctacatgtctttctgtagcctctgcatactactggctgtcatcacaccagcgtacagtagctaaatttttggtgcaattatagcaaatgataatgttcccttttgaacttttacattttggcatgacatttcagagtattgtgggaccatgagacaaaattaagtacgatcacattctttatttctcattttaaagaaatgatgttggtttaccttttcctagttgaagatagtaattaggtttctaagctgtatactgtgtttattggtggcagtgacaccaaagatagaggcaatggatagaaatttttaaactggaaagaaaacctgaattacactacattttcgaagtctcttgtaattatttgggatatcaacaaaatttgattcgtctgtctaatcccttgctagtattttaaatatgtctttaacacattgtatcctttaattcttcattaaaatggaaataagtagatgtttcaaagt

SEQ ID NO: 1672 - DNA, 1477 bp, Homo sapiens
gtggattttagagatacctcccctccttctgctcagctgccttgcagtaattaaactctttctctgctgcaacacccctactgttctccgtgtattggcttttctgggcagcaggaaggaaaagctgatgcgatgctctcagtgccgcgtcgccaaatactgtagtgctaagtgtcagaaaaaagcttggccagaccacaagcgggaatgcaaatgccttaaaagctgcaaacccagatatcctccagactccgttcgacttcttggcagagttgtcttcaaacttatggatggagcaccttcagaatcagagaagctttactcattttatgatctggagtcaaatattaacaaactgactgaagataagaaagagggcctcaggcaactcgtaatgacatttcaacatttcatgagagaagaaatacaggatgcctctcagctgccacctgcctttgacctttttgaagcctttgcaaaagtgatctgcaactctttcaccatctgtaatgcggagatgcaggaagttggtgttggcctatatcccagtatctctttgctcaatcacagctgtgaccccaactgttcgattgtgttcaatgggccccacctcttactgcgagcagtccgagacatcgaggtgggagaggagctcaccatctgctacctggatatgctgatgaccagtgaggagcgccggaagcagctgagggaccagtactgctttgaatgtgactgtttccgttgccaaacccaggacaaggatgctgatatgctaactggtgatgagcaagtatggaaggaagttcaagaatccctgaaaaaaattgaagaactgaaggcacactggaagtgggagcaggttctggccatgtgccaggcgatcataagcagcaattctgaacggcttcccgatatcaacatctaccagctgaaggtgctcgactgcgccatggatgcctgcatcaacctcggcctgttggaggaagccttgttctatggtactcggaccatggagccatacaggatttttttcccaggaagccatcccgtcagaggggttcaagtgatgaaagttggcaaactgcagctacatcaaggcatgtttccccaagcaatgaagaatctgagactggcttttgatattatgagagtgacacatggcagagaacacagcctgattgaagatttgattctacttttagaagaatgcgacgccaacatcagagcatcctaagggaacgcagtcagagggaaatacggcgtgtgtctttgttgaatgccttattgaggtcacacactctatgctttgttagctgtgtgaacctctcttattggaaattctgttccgtgtttgtgtaggtaaataaaggcagacatggtttgcaaaccacaagaatcattagttgtagagaagcacgattataataaattcaaaacatttggttgaggatgccaaaaaaaaaaaaaaaaaaaa

SEQ ID NO: 1673 - DNA, 2695 bp, Homo sapiens
ccgcctccccggccccctccccggaaccggcggtcgagctacggtcgcggagcagtggaaccgagactgccccgcggagccgccgctagacttcgggctccttgaggatattcagttttgtatgtttgaatatcctctcaccatgttcagcataaagtaccattcttaatgattatcctcaacaagacaggtgtgagagggttgctgttgtattgcaatcatggtgcagaaataccagtccccagtgagggtgtacaaatacccctttgaattaattatggctgcctatgaaaggaggttccctacatgtcctttgattccgatgttcgtgggcagtgacactgtgaatgaattcaagagcgaagatggggctattcatgtcattgaaaggcgctgcaagctggatgtagatgcacccagactgctgaagaagattgcaggagttgattatgtttattttgtccagaaaaactcactgaattctcgggaacgtactttgcacattgaggcttataatgaaacgttttccaatcgggtcatcattaatgagcattgctgctacaccgttcaccctgaaaatgaagattggacctgttttgaacagtctgcaagtttagatattaaatctttctttggttttgaaagtacagtggaaaaaattgcaatgaaacaatataccagcaacattaaaaaaggaaaggaaatcatcgaatactaccttcgccaattagaagaagaaggcataacctttgtgccccgttggagtccgccttccatcacgacctcttcagagacatcttcatcatcctccaagaaacaagcagcgtccatggccgtcgtcatcccagaagctgccctcaaggaggggctgagtggtgatgccctcagcagccccagcgcacctgagcccgtggtgggcacccctgacgacaaactagatgccgactacatcaagagatacctgggcgatttgactccgctgcaggagagctgcctcattagacttcgccagtggctccaggagacccacaagggcaaaattccaaaagatgagcatattcttcggttcctccgtgcacgggattttaatattgacaaagccagagagatcatgtgtcagtctttgacgtggagaaagcagcatcaggtagactacattcttgaaacctggacccctcctcaggtccttcaggattactacgcgggaggctggcatcatcacgacaaagatgggcggcccctctacgtgctcaggctggggcagatggacaccaaaggcttggtgagagcgctcggggaggaagccctgctgagatacgttctctccataaatgaagaagggctaaggcgatgcgaagagaatacaaaagtctttggtcggcctatcagctcatggacctgcctggtggacttggaagggctgaacatgcgccacttgtggagacctggtgtgaaagcgctgctgcggatcatcgaggtggtggaggccaactaccctgagacactgggccgccttctcatcctgcgggcgcccagggtatttcctgtgctctggacgctggttagtccgttcattgatgacaacaccagaaggaagttcctcatttatgcaggaaatgactaccagggtcctggaggcctgctggattacatcgacaaagagattattccagatttcctgagtggggagtgcatgtgcgaagtgccagagggtggactggtccccaaatctctgtaccggactgcagaggagctggagaacgaagacctgaagctctggactgagaccatctaccagtctgcaagcgtcttcaaaggagccccacatgagattctcattcagattgtggatgcctcgtcagtcatcacttgggatttcgacgtgtgcaaaggggacattgtgtttaacatctatcactccaagaggtcgccacaaccacccaaaaaggactccctgggagcccacagcatcacctctccgggtgggaacaatgtgcagctcatagacaaagtctggcagctgggccgcgactacagcatggtggagtcgcctctgatctgcaaagaaggagaaagcgtgcagggttcccatgtgaccaggtggccgggcttctacatcctgcagtggaaattccacagcatgcctgcgtgcgccgccagcagccttccccgggtggacgacgtgcttgcgtccctgcaggtctcttcgcacaagtgtaaagtgatgtactacaccgaggtgatcggctcggaggatttcagaggttccatgacgagcctggagtccagccacagcggcttctcccagctgagtgccgccaccacctcctccagccagtcccactccagctccatgatctccaggtagtgccgcgctgcctgcacctagtgtgcagaggggacggccgcccctcctcggacagccagctgcacccgcccacccagcggcgacattgtacagactcctctcacctctagatagcaaatagctctcagatggtaaacgtagtcgtttgatcccaaaactaccttggcaggtagttttaactctgatcctaacttaactcaatagccatagattttgtatacgttgtgcacaaaatccaaccagagcgcaagggctctcttgaaagaaaagtagtttctgtaccaattaaaggattgacgtggtctcagaaaaaaaaaaaaaaaaaaa

SEQ ID NO: 1674 - DNA, 1166 bp, Homo sapiens
ccccgccccgctgaggcctgtctgcagaatccacagcaaccagcaccatgcccatgacactggggtactggaacatccgcgggctggcccattccatccgcctgctcctggaatacacagactcaagctacgaggaaaagaagtacacgatgggggacgctcctgattatgacagaagccagtggctgaatgaaaaattcaagctgggcctggactttcccaatctgccctacttgattgatgggactcacaagatcacccagagcaacgccatcctgcggtacattgcccgcaagcacaacctgtgcggggaatcagaaaaggagcagattcgcgaagacattttggagaaccagtttatggacagccgtatgcagctggccaaactctgctatgacccagattttgagaaactgaaaccagaatacctgcaggcactccctgaaatgctgaagctctactcacagtttctggggaagcagccatggtttcttggggacaagatcacctttgtggatttcatcgcttatgatgtccttgagagaaaccaagtatttgagcccagctgcctggatgccttcccaaacctgaaggacttcatctcccgatttgagggcttggagaagatctctgcctacatgaagtccagccgcttcctcccaagacctgtgttcacaaagatggctgtctggggcaacaagtagggccttgaaggccaggaggtgggagtgaggagcccatactcagcctgctgcccaggctgtgcagcgcagctggactctgcatcccagcacctgcctcctcgttcctttctcctgtttattcccatctttactcccaagacttcattgtccctcttcactccccctaaacccctgtcccatgcaggccctttgaagcctcagctacccactatccttcgtgaacatcccctcccatcattacccttccctgcactaaagccagcctgaccttccttcctgttagtggttgtgtctgctttaaagggcctgcctggcccctcgcctgtggagctcagccccgagctgtccccgtgttgcatgaaggagcagcattgactggtttacaggccctgctcctgcagcatggtccctgccttaggcctacctgatggaagtaaagcctcaaccacaaaaaaaaaaaaa

SEQ ID NO: 1675 - DNA, 2052 bp, Homo sapiens
cccacagagtccatggaacccacggagcccatggaacctacggagcccatggaaccggcgcggagcgcgcaccgtgggggcgaggcgctgctgcgggagctggaggtgctggtgcaggacgtggtgaggacgagctcctggtgggagcgccacggcgtggactgcgccatcctcgcgctcagcctcttcgccttgccggcaggcttcctgtgcctgcgctgggagaatgccctggtctttgcatccggcatcaccatcttgggtgtgtgccactacacactcactgtcaagggcagccacctggccactcatggggccctcaccgagtccaaacgctggagcaagatctggctgcttttctttgtggaggtgtgcacagccttcactgcagagcacgccacgcatgggcacgtcaagatgcaccatgcctacaccaacgtggtgggcctgggggactccagcacgtggaggctgccttgcctcaaccgctatgtctacatgttccttgctcctttcctcctccccatcgccactccactggtggctgtcgagcggctgaggaaggtggagctcgggacagccctgcggacgctggccctgatttctctgggcctttattctcactactggctgctcctgaacgtgtcaggcttcaagaaccccagctcagccctgggctgcatgttcctcaccagatccctgttggcccacccctacctccacgtcaacatcttccagcacatcggactgcccatgttctcccgggacaacaagccccgtcggattcacatgatgagcctgggggtgcttaacctggcccggctgcccgtgctggactgggcgttcggccactcgatcatcagctgccatgtggaacaccatctattccccaggctctctgataacatgtgcctgaaggtgaagcccgtggtgtcccagttcctacgtgagaagcagctaccgtacaacgaggactcatacctggctcgcttccagctgtttctccgtcgctatgaggaattcatggtgcaggccccacccatcactgagcttgtggggctgtaatgaggccgggccggtgcagccaccctgcccctccctggcctggccctggccctcctgctgctgctggtccagggggtgtggctcagtggctggtggtggacctggagagtggaggcaccggccaggcaggggggcaggggagctcaggcctggggtctgggggccacctgccttgcgtgcttttctgggttttgaggggtgtctgggggaagcggtaatggtggctgtgcattctggtcagtctggacctcagcaacttcatctcaggactaaagagctgggtccttccccctgctccatctgagccttggtagggttaaagggaggtgacagggtgaagagggatcctgtgcaggggccacctgggagatagcagggggcacagagagagcagggtcagctccctcggctgggacctccctggcattgggagagccccacacggccttggctattgcttccttcaggctctgcccaccaaggtgccctctccccggggaccttagggtgagcttgcttttggcaggccttcctcgatcctcagccaaaggaacctgtgcaagacactggctcagcagttccccaggccacagtatcagcaagataaaagtgagtgtgttttgtcgggagggaactccaggggaagtgaggggagaaggttccccagggacagagttagggaaagagtataaatagccagccaggggcggtggctcatgcctgtaatcccagcactttgggaggccaaggcgggtggatcgcgagatcaggagctcgagaccaccctggccaacatggtgaaaccccgtctctactaaaaatacaaaaaattagctggatgtggtggcatacacttgtagtcccagctacttggcaggctgaggcagaagaatcacctgaacccgggaggtggaggttgcagtgagccaagattgcaccattgcattccagcctgggtgacagagcgagactccatctcaaaaaaat

SEQ ID NO: 1676 - DNA, 733 bp, Homo sapiens
gaattccagagcaacatgcccaagttttattgtgactactgcgatacatacctcacccatgactctccatctgtgagaaagacacactgcagtggaaggaaacacaaagagaatgtgaaagactattatcagaaatggatggaagagcaggctcagagcctgattgacaaaacaacggctgcatttcaacaaggaaagatacctcctactccattctctgctcctcctcctgcaggggcgatgataccacctccccccagccttccgggtcctcctcgccctggtatgatgccagcaccccatatggggggccctcccatgatgccaatgatgggccctcctcctcctgggatgatgccagtgggacctgctcctggaatgaggccgcccatgggaggccatatgccaatgatgcctgggcccccaatgatgagacctcctgcccgtcccatgatggtgcccactcggcccggaatgactcgaccagacagataaggatagaggggaggccttattgtatcggttttatattacctgttctgcttcaccaggagatcatgctgctgtgatactgagttttctaaacagcataaggaagacttgctcccctgtcctatgaaagagaatagttttggaggggagaagtgggacaaaaaagatgcagttttcctttgtattgggaaatgtgaaaataaaattgtcaactctttcagttaaaaaaaaaaaggaattc

SEQ ID NO: 1677 - DNA, 3289 bp, Homo sapiens
cgcggagcggaggccgaggcgagagcctggcgctgtaggactagaacgaaaggagtgaggcgccgagagcccagataccattttggcgtgagagctggtggttggcaaggccgcgggagtgggaagcgtccgccatgttctgcgaaaaagccatggaactgatccgcgagctgcatcgcgcgcccgaagggcaactgcctgccttcaacgaggatggactcagacaagttctggaggagatgaaagctttgtatgaacaaaaccagtctgatgtgaatgaagcaaagtcaggtggacgaagtgatttgataccaactatcaaatttcgacactgttctctgttaagaaatcgacgctgcactgtagcatacctgtatgaccgcttgcttcggatcagagcactcagatgggaatatggtagcgtcttgccaaatgcattacgatttcacatggctgctgaagaaatggagtggtttaataattataaaagatctcttgctacttatatgaggtcactgggaggagatgaaggtttggacattacacaggatatgaaaccaccaaaaagcctatatattgaagtccggtgtctaaaagactatggagaatttgaagttgatgatggcacttcagtcctattaaaaaaaaatagccagcactttttacctcgatggaaatgtgagcagctgatcagacaaggagtcctggagcacatcctgtcatgaccatgcgccgaggcacttccaggcttcactcaactcatggactcctctgtactcactctctccaccactcccttcacctccctctttgattttagaagctatagacattgtttaagataactaagaatacttggctaagaagtataatttgctaactattaaggactttctttttttaatgttgtacactattcttcctactcttttttggttttggttttgttttgtagagactgtctcactatgttgcccaagctggtctcaaactcctggcctcaagcagtcctcccaccttagcttctcaaagtgttgagatcacaggcgtgagccactgcacccggcccctactcctttttctaataagctgtatctgtaatcacagcattcctacagttgttacagtgtgttttttaaatgaaagtaaacatggttacatttgaatctcttaaataagcagtcacttggctggacaggaagaaggtagatcctgtgtgtcttgttttctggtcatgtgtattgtacaagctagagagctgaatttctgagatacacattttcaaatcacatgcaagtgaagatgatggtctgtagaaattttcagtatatataatgtttaatgacatactaatttatcatctggctatttgggaaggaaggacacacatggattttgcacatttccaccatggtggctggtgtggcttgtggctatggggtgatcaccagtatcaccactttggaaggggacagtgaaattggggctagagaaggaactttgtacagttttccctgagattcagattgactgaaaagtcacatgaagagttgattgtcttttaatggtatgttttaaacagctgacattttaaattttgatgaaatccagtttattcgtttgttcttttatgctttgggtgttgcatccgagaaatcttttcccatcccaagatcacaattttttttcctttttacttctagaagtgttataattttaagctttatactttggtctatgacccgtttttttttttgttttgttttgttttttcgtttgtttctttgttttgagatggagtcttgttctgtcacccaggctggggtgcagtggcgtgatcttggctcactgcaatctctatcccctgggttcaagtgattctcttgtctcagcctcccaagtagctgggattacaggcacaggccgccacgcctggctaatttttgtatttttagtagagacagagttttaccatgttggccaggctggtttcaaactcctgacctcaagtgacccaccttggcctcccaaagttttgggattacaagtgtgggccaccgcggccagcctatgatccattttgaatgaattttttatatggtgcaaggtgtcaatccaccttcactttttcttgggaatatagatatccagctgtttcactaccattttttgaaaggactgccctttgctctatcacctttgcatttttgttaaaaagtagttgtcaatgtatatgtgggtttatttcaggactctgttttgttccattgacctgtttttctctcctgaatgccaataccatatttgtatgtagtgtatgtaattttctaataattcttgaaacagatagtattaatgtgtcatatttttgctgttgtttgtattttttgtagagatggggtttcaccgtgttggccaggctgtgttgaactcctgagctaaagcaatacacttgcctcgtcctccccatgtgctgggattacaggcgtgagccttggtgctggcccagtgtaccacatttctttttgagatttgttttggctatgttaagtcctttgcttttgatgtgaaatttgggaacaggcagggtgtggtggcttatgcctgtaatcctagaactttgggaggcctagatgggtggatcacttgagctcaggagttccagaccagcccgggcctatggcaaaactccgtctctacaaaaaatagaaaaaattagccaggtgtggtggtgcatgcctgtagtcacagttacacggcaggctgaggtgggaggatcacttgaaccccagaggtcaagactgcagtgagctgagatcacaccactgtactccagcctgggtgacaaagtgagactctatctcaaaaagaaattaggatcaatttgtcaatttctacaacaacaacaacaaaaacccctgttgggcaccttgattgagattgcattgaatttatataaaactgttgggagaattgacatcttaataatattgagtcttctggcctataaacaaggtctgtcttcctaggtattaatgttttgtcttctatttctcttaataatcttttgtagttttcagtgtacaggtctaccatgtcagcatttcatagttttgatgctaaatggtattttaaaatttcaaattctaaccacttgttgctagtaaatagaaatacaattgatgttgaacttgtatccttcagccttgctaaactgtgagttctcatggtgtttttgtaaattacatcaacagtcatgtgttctatgaataaagagttttactccttc

SEQ ID NO: 1678 - DNA, 2277 bp, Homo sapiens; identical to SEQ ID NO: 736

SEQ ID NO: 1679 - DNA, 796 bp, Homo sapiens
gggagctgccgggagttggagcctgcggagttcgagaccatgctgctgttctgccccggctgcgggaacgggctgatcgtggaggagggacaacgctgccaccgcttcgcctgcaacacgtgcccctacgtgcacaacatcacccgcaaggtaacaaatcggaagtacccaaaactgaaagaagtggatgatgtgcttggtggagcagctgcctgggagaatgttgactctactgcagagtcgtgtcccaaatgcgaacatcctcgtgcttacttcatgcagcttcagacccgctctgcagatgagccgatgaccaccttctacaagtgctgcaatgctcagtgtggacaccgctggagggattagggccaggatggcccagctgccctagtgtgtgcttgccttgtccctcggggtagatgcttagctggcagtatgagttgtgtgtcctgagggtctttgctagtgtggtggaaagataaaccttttgaggtgaagagccagggggtcaggaaatatggcctatctgccaggcagggtggatgaagtcatgaatgtctgggagtttttctgtgtggggaggagacagagacccataactaaatatgctctgtgtaaagtcctattctttcatcttccactttattggcagttgacattcccttactcccaatcaacactcttaaatatttgtactgtttgtaaaacttagtacatgtccctaaatatttaactgttacttgtaaacttgtgtaatttattatttattttaatcaaaattctgaatatttcattt

SEQ ID NO: 1680 - DNA, 4153 bp, Homo sapiens
gcggggcggggcccctgcgggcttgcagcgggctactgtttgccggagcctcccggcgcgcccccgcgagccccctcccgtctggcgcgcgaccccgccgcttcgaatgttgtgaatcaaatgtggggtttgttacattccgctgccgccgcggacagttcttaaagggccagccgccggctgccgcgcagacccagctgcgtcctgcgccgcctcccgctccctgagggcctgggccgagagagactgatcgcgcgtgggcctcgcgaggcagacgccgtcgggcggacaacaaagagagaggccccggaaggagccgggctgcccccggacccgggggtggggaggggagcacattgttccgcagggcgggagctcttaaaggatccagacaggcaccccccccctcccccgccccctgcccagtttggccgtcctagatcgggaacaaaggagtcaacgtgtggccgggcggccaaagggttgtgagtcccggcccagcccctccacccccctgcccccccgatgcgaccatgggctctggcagtgactaggtggccaccctccgcccccgtgggccagcggcgattctctgcgggacctggcagcaccccgggccagctctggggaagccctggcctcgagggccccctggccagcccgcctgcccgggatgagcgcttaccctcccagcagccgccgtcccgacctccacacctccccgtagaggagcgccgagcctcggctcctgccggcgggagcccccgaatgctgcacccagccacccagcagagcccgttcatggttgatctccacgagcaggtgcaccagggacctgtccctctgtcctacacggtcaccacagtgacgacccaaggcttccccttgcctacaggccagcacatccctggctgcagtgcccagcagctcccagcatgctccgtgatgttcagtgggcagcattaccccctctgctgcctcccgcccccgcttatccaggcgtgcaccatgcagcagctgcctgtgccctatcaggcctacccccacctcatctccagtgaccactacatcctgcaccccccaccaccggccccacccccccagcccacccacatggcgcccctggggcagtttgtgtctctgcagacccagcaccctcggatgcccctccagcggctcgacaacgacgtggacctgcgtggggaccagccctccctgggcagcttcacctactccacctctgcgcctggcccagccctttccccgtcggtgcccctgcactacctgccccacgatccgctgcaccaggagctgtcctttggtgtgccatattctcacatgatgccacggagactgagcacccagagataccgcctgcagcagccactgcccccgccgcccccacccccacccccaccaccctactaccccagcttcctgccctacttcctctcgatgctgccaatgtcaccaacagcaatggggcccaccatcagcctggacctggacgtggatgatgtggagatggagaactatgaggccctcctgaacctggccgagcggctgggagatgccaagccccggggtctcaccaaagcagacatagagcagctcccgtcgtaccgctttaacccggacagccatcagtcggagcagacgctgtgtgtggtctgcttcagtgacttcgaggcgcggcagctgctccgagtcctcccctgcaaccatgagttccacaccaagtgtgttgacaagtggttgaaggccaaccggacgtgtcccatctgccgggccgacgcctccgaggtgcccagggaggctgagtgaggccacgcagccgcctgcccgggagaaccctgcctgaagctctggaaacttgtgggtggggcccagggaggatggggagggagtggcccaggcctgccccttcgctcctgcctgcatttccagagctggtgccagggtcagcccagcgaggagtccctgcaataagcccctgcatttgccaagctccaaagactccctccctagtctgcctgcctgcccgcccgccacggagctgcctgagtgtccctgatcgggtctccctcctgtgcaccctcaggtccctccttttcctgctggcactgagtgccaggggtccgctccctcagtggggccggtggagatccttggccccaggatgggcagacagagcaccatcctgggtcagaaggtctcatgctctgaaatggcgtgccctctgcccaggtggcactgccaggtgcgtagacagacggtgtcacgagccatttcctgagccccagggctgaatcccccctccttgaccccgaacagtgaactcaggcagctggctctgtgttggctgctgtgagggctgagtctggttccctaggggaccctcatcccaggaacaacattccagccccaccctcaggctggagggcgtcccagcctaatcccgagctggggcacacgtatcctgaggggcttgggccatacggggagagggagccctgtgttcccggtggttgtccctcccagggatgcagccagacccgtgcccaatctcctctccctctgttgttttgcatgaacgtgaggagcagcagtttttgttcattcatttggcccaaaatcacgtgtaggatttggggatgtggatatttaagacaatttcttttttcttttggtttaataggggcgggtatagggaccaactgggaccgagtgcccagggggccgagcacggtcatgctggccggcctgcatgcatgcgtgtgccgggctgggctgggcggccggcggtcgtggggcagggttgggggtctgtgctcagctgataactgccatgcactgtactgcacacgtccctagagcctaccgggacccgacgcttttcagggcatttctccctccagccagggcccaactcccacctgcctgggcgaatctcctccaaggaagtcccaggaggatggggaccaggaaggctgtggacccccatctccagggggccttcccagcctgatccctgtcctccaagttctggaggaggccgctgtagggtctggctgagcttcccacccactttccctggtcccaatcctttcttgtcctatacccagctggggttgctgccctgaacgaactgcgtgtggggccggcacatcctagcaggcagcccctggcgcctgctgcctcagggatgctccaaccaccctcgttctcctcgcagtggccctggctcccacctcccgccccagcctgccgtggggcccgtcagcctggtcccacccccatggagaacccaaagtcttactgtatataactccaggtgacgtttctatatttatagcagtgttgaaaacccacgtgttttacacagaaccaccctctccaacccctcccttcccgaccccaacaaaacgttttcaaaccccttacagttcctggggcaggcggaaacaggctcacagattgtgtgtcggctgcagcagtgattccaacaagcagctattgggggggaaacacagcatttaaaaagatcatcattaaaaaacaagatttatacaacaattacttaggatgtttgtgatctgccgaccttgctatagatgccatgttaccaatgatttcctgtggtgggggcttgccattgtttactctcttatttaccaacttctggcctaggcatgacagtgggcaccttcccccagccctggctgggcccagcgcctgtgttctgtgttagaaaggttttatatatatataaaattacatatatatgtagaaatatatgtaattttgggggccctgttccttgcacattttacagttacctcatttttcccatgtatgtatttgagaaaatgctaatatatagagaaaaaaatggttcttaaagcttaaatgtgtggttttttccattccatgggattcacattggtttgtagcatttaacataactagtatgttgtattatatatatgtgtatactgattgaaatttttaacagatttgtactttttttaaaatgaaagttgctagttctgcttgaccaagtagtgcaatcattattttttttaatattgttgctgatttcagagggatattcactaataaatgtatgatgtataccaacgaccgcccacgc

SEQ ID NO: 1681 - DNA, 645 bp, Homo sapiens
gcgccgccatcgccgtcatgctgggcgccgctctccgccgctgcgctgtggccgcaaccacccgggccgaccctcgaggcctcctgcactccgcccggacccccggccccgccgtggctatccagtcagttcgctgctattcccatgggtcacaggagacagatgaggagtttgatgctcgctgggtaacatacttcaacaagccagatatagatgcctgggaattgcgtaaagggataaacacacttgttacctatgatatggttccagagcccaaaatcattgatgctgctttgcgggcatgcagacggttaaatgattttgctagtctagttcgaatcctagaggttgttaaggacaaagcaggacctcataaggaaatctacccctatgtcatccaggaacttagaccaactttaaatgaactgggaatctccactccggaggaactgggccttgacaaagtgtaaaccgcatggatgggcttccccaaggatttattgacattgctacttgagtgtgaacagttacctggaaatactgatgataacatattaccttattttgaacaagtttccctttattgagtaccaagccatgtaatggtaacttggactttaataaaagggaaatgagtttgaactg

SEQ ID NO: 1682 - DNA, 1751 bp, Homo sapiens
cagcgcagcgcaccgcgggaagatggcgttggaggtcggcgatatggaagatgggcagctttccgactcggattccgacatgacggtcgcacccagcgacaggccgctgcaattgccaaaagtgctaggtggcgacagtgctatgagggccttccagaacacggcaactgcatgtgcaccagtatcacattatcgagctgttgaaagtgtggattcaagtgaagaaagtttttctgattcagatgatgatagctgtctttggaaacgcaaacgacagaaatgttttaaccctcctcccaaaccagagccttttcagtttggccagagcagtcagaaaccacctgttgctggaggaaagaagattaacaacatatggggtgctgtgctgcaggaacagaatcaagatgcagtggccactgaacttggtatcttgggaatggagggcactattgacagaagcagacaatccgagacctacaattatttgcttgccaagaaacttaggaaggaatctcaagagcatacaaaagatctagacaaggaactagatgaatatatgcatggtggcaaaaaaatgggatcaaaggaagaggaaaatgggcaaggtcatctcaaaaggaaacgacctgtcaaagacaggctagggaacagaccagaaatgaactataaaggtcgatacgagatcacagcggaagattctcaagagaaagtggctgatgaaatttcattcaggttacaggaaccaaagaaagacctgatagcccgagtagtgaggattattggtaacaaaaaggcaattgaacttctgatggaaaccgctgaagttgaacaaaatggtggtctctttataatgaatggtagtcgaagaagaacaccaggtggagtttttctgaatctcttgaaaaacactcctagtatcagcgaggaacaaattaaggacattttctacattgaaaaccaaaaggaatatgaaaataaaaaagctgctaggaagaggagaacacaagtgttggggaaaaagatgaaacaagctattaaaagtctaaattttcaagaagatgatgatacatcacgagaaacttttgcaagtgacacgaatgaggccttggcctctcttgatgagtcacaggaaggacatgcagaagccaagttggaggcagaggaagccattgaagttgatcattctcatgatttggacatcttttaagtacattttcaacagtttgaggactaagcctttctaaaataacattgtaataaaccatttttactgagattgcaacgttttgcactgataaacatgagaatctggaggaaagacaattgttttcttgtttaaaatatgtgtggaaaggaatgcaattgatagaacatttaaagatatatctgacaaaatacttaagagtatatagcacaggatttaatttctcaatctgttgcatgtgctaattatgagtattactagttgataatcagttttgtctaggtcataacataccatttgtaagtttgtttgctttttcaggtttatctttgcagtgaattatgctttgctttaaaacattccgctaaaatcataatgggacatataaattattaagctgttagaaatgcattcaaatttgttttttctgtgttctaagaactcaggcaattttaaggataaaaactaacattggccaggcacggtggctcacgcctgtaatcccaacactttaggagaccaaggcgggcagatcacttgaggtcag

SEQ ID NO: 1683 - DNA, 2430 bp, Homo sapiens; identical to SEQ ID NO: 1078

SEQ ID NO: 1684 - DNA, 2625 bp, Homo sapiens
agacgacgcgccgtgcgcctgcgcacggcttgcccatgtgtgctgcagccgtcagccggcccagctgagcagcagcaacggaccttgttaacggcgcggcagcctccaccgcctgctgttgccctcctctctcggtggtctgtccgcccagcgcacgtcaccatgggcaagagccggacgaagcgcttcaagcgacctcagttctcccctacgggcgactgtcaggccgaggcggctgcggcggcgaatgggaccggaggcgaggaggacgacgggccggcggcggagctgctggaaaagctccagcacccgagcgccgaggtccgcgagtgcgcctgcgcagggctggcccggctggtgcagcagcggccggcactcccgggcctggcgcgacgagacgccgtgcgccgcctcgggccgctgctgctagaccccagcctggccgtcagggagactgcagccggcgcgctgagaaatctcagtgcttgtggaggttttgaagtttgtgatgacatggtgactaaggatatcatgacccctctggttgcgctgctaaaagagtgtagtgctggactggattcaaatgagatgtctctgcaggagaaaaaagatcagaacagaaattctattgagaacatagccaatgagactgtgaacgtgctgtggaatatatgtgaatgcagtagtagagcagtgtctatattcaacaaagaagggtgtttggagattgtgttaaagtatttaagtaggtttcctaccaatgttgacctggctatttcagtagcatattgtttgcagacagtgactgaggataacccagagctgctgaagtctttcagtgctacagcattgaacatgctggaatcagcactgctttctcctgtcagttccatggaatctcttctattgaagacattggtagcaggcacaatttggaatctaaaggacattattccatgcaagagtcaagcagaaatcataaatgccttactaaagatcttatctgaagttttgggaatggatgctggtgaaatggttattcaaatgaaagaggctgaaacgcaaaggttaaaaactgctgcagaggctgaggaaatattagagaacactaatggggatgatttgattgaagatgatgaaatggaaggaatttctcataaaagaagagtcagaaggaaaactttcgtttcagatttacttccgcccactgacaaggaactgagagagactatagcattgctgacagcccaacagactgctctggaaattattgtcaacatgtgctgcaatgaagatccctctgatgacgaatgggaagagctttctagcagtgatgaaagtgacgcatttatggagaattccttcagtgagtgcgggggacagctgttttctcccctctgcctctcccatgaagttcacacggctctcaccaactacctcatcccaaagaagatttttgagaaaactgcctttccaaacagcattgcagttgacctatgttctaggaaccctacttggaaacctttgattagaaaaatgaacactattcagtgcagagccctcttctgtctccagagtcttgtgtccctcctggatgtggagcacctgggaggagccgcagcccttcagacgcttgcacagcatctgtcacagctgcttttttctcaaccagattttgctaaacatgttgactttctagaagccataagtagtgctttgagggcccttttgcaaacaatggcctccaagaacatttcccagtgcatgactcctgatcagctgatgacattatgcaaagcaggcattcatagtagtaatgtcggggttagagtgaatgtcgttagcattttaggaatcactggcagcgtccttgccaaagaagatggtacacttgaaactcttaagaacattgggtgctttctgcttgaagttaccaccaaagatccttcccttgtggtagcaggagaagctttggatgccctctttgatgtttttgcagatggtaaagaagccgaaagagcctcgattcaaattaaattattatctgctctgaaagaattccagccggtctttaaaatgaagatacgtaaagaagggagaggtaactatagcacagatcagctgtgtgttcttgacaatgtgaaaatgaatttgcgaagatttattgcttatcaagaaactgttgagaaaagactgacttcttaaacaatccaaaaaagaaaccagttcttcccccaaagtattcaatgcttagaatactaaaaggttttctttgaatgtatatgtttctgaaagtcattttttaatgattacattctgtacattctgtaaaaacttcaaaacctggccaggcatggtggctcacgcctataatcccagcaccttgggagaccgaggcgggtggatcacttgaggtcaggagtttgaggccagcctggccaacatggtgaaaccgcatgcataagcatggtggcacatgcctgtgatcccagctactcgggaggctgagggaggagagtcggttgaacctgggagacagaggttgcagtgagctgagatcacgctactgcactccagcctgggtgacagagggagaccctgtctccaaaaaaaaaaaaaaaaaaa

SEQ ID NO: 1685 - DNA, 926 bp, Homo sapiens
gctcgtgctgtgacgcaagcctcgcctcgccccgcgccgcgcgcgttgccagggtgatcaggtgactcccggttcgcggcgctgggagcggccgtgacgtcaggcgcccggctgctcctcacttgctctgagacaggtgcggcaagtctactgcgggctggtccgggctcctcaggttcagacccgaccgttatccagtcggttcgtggagaggagaggtgcactttacaggtccccgatgaaccaagagaaccctccaccatatccaggccctggtccaacggccccatacccaccttatccaccacaaccaatgggtccaggacctatggggggaccctacccacctcctcaagggtacccctaccaaggatacccacagtacggctggcagggtggacctcaggagcctcctaaaaccacagtgtatgtggtagaagaccaaagaagagatgagctaggaccatccacctgcctcacagcctgctggacggctctctgttgctgctgtctctgggacatgctcacctgaccagaccagcccagccgtcctgtcctgccagctctgctgccacctctgacaggtgtgcctgcccccatctcttctgattgctgttaacaaatgactagctttgcacagacacctctaccttcagcactatgggattctagattaatgggggttgctactgtttaattcagtgacttgatctttttaatgtccaaaatccatttcttattgatctttaaagatgtgctaaatgacttttttggccaaaggcttagttgtgaaaaatataatttttaaattatacattcaaggtagtggccaaatgtaacacatcaatcatggaatgatttctctgctaacagccgcctgtatgtttcaataaatttgtccaaagctcaaaaaaaaaaaaaaaaaa

SEQ ID NO: 1686 - DNA, 1690 bp, Homo sapiens
gggggcgacggccgctgtgacgctgcggcggcggcgggcgggcggcggcgcgtgagacgcgcgatccccggtgtcttgggagcagtgccccggcccccgccgctcccgccgccgccatgtcgggccggtcggtccgggcggagacccgcagccgggccaaggacgacatcaagaaggtgatggcggccatcgagaaagtgcggaaatgggagaagaagtgggtgactgtgggtgacacgtccctgaggatatttaagtgggttcctgtgacagacagcaaggagaaagaaaagtcaaaatcgaacagttcagcagcccgagaacctaatggctttccttctgatgcctcagccaattcctctctccttcttgaattccaggacgaaaacagcaaccagagttccgtgtctgacgtctatcagcttaaggtggacagcagcaccaactcaagccccagcccccagcagagtgagtccctgagcccagcacacacctccgacttccgcacggatgactcccagcccccaacgctgggccaggagatcctggaggagccctccctgccctcctcggaagttgctgatgaacctcctaccctcaccaaggaagaaccagttccactagagacacaggtcgttgaggaagaggaagactcaggtgccccgcccctgaagcgcttctgtgtggaccaacccacagtgccgcagacggcgtcagaaagctagcaccatcccggccctccgcctcctggccctgcctctatttattgcattctggttctggccgcgccgcgttgctggggtaagggcaagcactggggtcaagagcctgcacacatgagccttccgggctggaaggctggcgtaggacttggggctgtagcatcatcttcctgaccctggcacctgtgtctacttgctcccgagaagaggagcgctcatgtcttttttgcaccccaagttggctggagcatcggccaccccaagattcatctgtgacctccaggcagcagtctctgctccagaatctctggacggagctgctggcagcttctgcgagaagagagagatgtggaaggcaccttctagaagagagcgtgcctcaggttacttgaacttgaacggagactgtagactcccggactttcccctaggactgggggccctgtaggctgctgttggaggactgggtagagacattggagggaagggaagggcttttctccacacaagggcagagagtccgtctagatttcttgctgtcctgccagctctgcccatgcctgaggtggtcctacctctcacgggcaccctagctgctgacagccctttgtggccgccgtccccatcccctgccctcagcacacacatctgcacacacgcagctttgttctcacctctacctgtcattccagcatccctgcctcttgtcacaaactgccccagcaagaatttgaggttctgacaacagtacccatcccccacagtaccccttcagctcagtttctagaaagctcccttttctttgaaatctgcatgttgaattgaactttgtgattttattttttgtttcaaaaaagtttaagaaaatggaaatgggcaacagtgagtgaagacatattttagcactgaatagaatatttttaaaattaaactgtttgaaatatgaaaaaaaaaaaaaaaaaaaaaaa

SEQ ID NO: 1687 - DNA, 855 bp, Homo sapiens
gaggcccggctgcagacctctcccgagaggggaataatccgtgccggccggttccgccatggagccaggtgcaggtcacctcgacggtcaccgcgcggggagcccaagccttcgtcaggctctgtgcgacggaagcgcagtgatgttttccagtaaagaacgcggacgttgcaccgtgatcaattttgtccctttggaggcgccgttacggtccacgccccgctcgcgtcaagtgactgaggcctgtggtggagaaggacgtgccgtgccgctgggttctgagccggagtggtcggtgggtgggatggaggcgaccttggagcagcacttggaagacacaatgaagaatccctccattgttggagtcctgtgcacagattcacaaggacttaatctgggttgccgcgggaccctgtcagatgagcatgctggagtgatatctgttctagcccagcaagcagctaagctaacctctgaccccactgatattcctgtggtgtgtctagaatcagataatgggaacattatgatccagaaacacgatggcatcacggtggcagtgcacaaaatggcctcttgatgctcatatctgttcttcagcagcctgtcataggaactggatcctacctatgttaattaccttatagaactactaaagttccagtagttaggccattcatttaatgtgcattaggcacttttctgtttatttaagagtcaattgctttctaatgctctatggaccgactatcaagatattagtaagaaaggatcatgttttgaagcagcaggtccaggtcactttgtatatagaattttgctgtattcaataaatctgtttggaggaaaaaaaaa

SEQ ID NO: 1688 - DNA, 2617 bp, Homo sapiens
cctcgatcccctcgccgcggtcccatggaggaggaggcgagccgcagcgccgcggcgacgaacccagggagtcggcttacccgctggccgcctcctgacaagcgggagggatccgcggtggacccagggaagcggaggagcctggcggccaccccctcttcctcacttccctgtactctcatcgctctcggcctccgacacgaaaaggaagcaaatgagctgatggaagatctgtttgaaactttccaagatgagatgggattctccaacatggaagatgatggcccagaagaggaggagcgtgtggctgagcctcaagctaactttaacacccctcaagctctacggtttgaggaactactggccaacctactaaatgaacaacatcagatagcgaaggaactatttgaacagctgaagatgaagaaaccttcagccaaacagcagaaggaggtagagaaggttaaaccccagtgtaaggaagttcatcagaccctgattctggacccagcacaaaggaagagactccagcagcagatgcagcagcatgttcagctcttgacacaaatccaccttcttgccacctgcaaccccaatctcaatccggaggccagtagcaccaggatatgtcttaaagagctgggaacctttgctcaaagctccatcgcccttcaccatcagtacaaccccaagtttcagaccctgttccaaccctgtaacttgatgggagctatgcagctgattgaagacttcagcacacatgtcagcattgactgcagccctcataaaactgtcaagaagactgccaatgaatttccctgtttgccaaagcaagtggcttggatcctggccacaagcaaggttttcatgtatccagagttacttccagtgtgttccctgaaggcaaagaatccccaggataagatcctcttcaccaaggctgaggacaacaagtaccttctaacctgcaagactgcccgccaactgacagtgagaatcaagaacctcaacatgaacagagctcctgacaacatcattaaattttataagaagaccaaacagctgccagtcctaggaaaatgctgtgaagagatccagccacatcagtggaagccacctatagagagagaagaacaccggctcccattctggttaaaggccagtctgccatccatccaggaagaactgcggcacatggctgatggtgctagagaggtaggaaatatgactggaaccactgagatcaactcagatcaaggcctagaaaaagacaactcagagttggggagtgaaactcggtacccactgctattgcctaagggtgtagtcctgaaactgaagccagttgccgaccgtttccccaagaaggcttggagacagaagcgttcatcagtcctgaaacccctccttatccaacccagcccctctctccagcccagcttcaaccctgggaaaacaccagcccaatcaactcattcagaagcccctccgagcaaaatggtgctccggattcctcacccaatacagccagccactgttttacagacagttccaggtgtccctccactgggggtcagtggaggtgagagttttgagtctcctgcagcactgcctgctatgccccctgaggccaggacaagcttccctctgtctgagtcccagactttgctctcttctgcccctgtgcccaaggtaatgatgccctcccctgcctcttccatgtttcgaaagccatatgtgagacggagaccctcaaaaagaaggggagccagggcctttcgctgtatcaaacctgcccctgttatccaccctgcatctgttatcttcactgttcctgctaccactgtgaagattgtgagccttggcggtggctgtaacatgatccagcctgtcaatgcggctgtggcccagagtccccagactattcccatcgccaccctcttggttaaccctacttccttcccctgtccattgaaccagccccttgtggcctcctctgtctcacccttaattgtttctggcaattctgtgaatcttcctataccatccacccctgaagataaggcccacatgaatgtggacattgcttgtgctgtggctgatggggaaaatgcctttcagggcctagaacccaaattagagccccaggaactatctcctctctctgctactgttttccccaaagtggaacatagcccagggcctccaccagtcgataaacagtgccaagaaggattgtcagagaacagtgcctatcgctggaccgttgtgaaaacagaggagggaaggcaagctctggagccgctccctcagggcatccaggagtctctaaacaactcttcccctggggatttagaggaagttgtcaagatggaacctgaagatgctacagaggaaatcagtggatttctttgagctaggagaataagagtctggagactgggagccttcacttcggcctccgattggtggcgcatagggtgtaaccaataggaaacccctaaagggtacttaaaccccagattttgcaactggggctcttgagcagcttgctttagcctgctcccactctgtggaatatacttttgcttcaataaatctgtgcttttattgcttc

SEQ ID NO: 1689 - DNA, 2603 bp, Homo sapiens
ccacgcgtccgcgctcccctcagctcctgcagtgctaattaagggagggagcagcggggagcttgcagtgaccaagagggtgttgaggctaggaggccacgataaacaggatacgataaaagtccttaaccaagacgcagatgggaagaagcgttagagcgagcagcactcacatctcaagaaccagcctttcaaacagtttccagagatggattatcctactttacttttggctcttcttcatgtatacagagctctatgtgaagaggtgctttggcatacatcagttccctttgccgagaacatgtctctagaatgtgtgtatccatcaatgggcatcttaacacaggtggagtggttcaagatcgggacccagcaggattccatagccattttcagccctactcatggcatggtcataaggaagccctatgctgagagggtttactttttgaattcaacgatggcttccaataacatgactcttttctttcggaatgcctctgaagatgatgttggctactattcctgctctctttacacttacccacagggaacttggcagaaggtgatacaggtggttcagtcagatagttttgaggcagctgtgccatcaaatagccacattgtttcggaacctggaaagaatgtcacactcacttgtcagcctcagatgacgtggcctgtgcaggcagtgaggtgggaaaagatccagccccgtcagatcgacctcttaacttactgcaacttggtccatggcagaaatttcacctccaagttcccaagacaaatagtgagcaactgcagccacggaaggtggagcgtcatcgtcatccccgatgtcacagtctcagactcggggctttaccgctgctacttgcaggccagcgcaggagaaaacgaaaccttcgtgatgagattgactgtagccgagggtaaaaccgataaccaatataccctctttgtggctggagggacagttttattgttgttgtttgttatctcaattaccaccatcattgtcattttccttaacagaaggagaaggagagagagaagagatctatttacagagtcctgggatacacagaaggcacccaataactatagaagtcccatctctaccggtcaacctaccaatcaatccatggatgatacaagagaggatatttatgtcaactatccaaccttctctcgcagaccaaagactagagtttaagcttattcttgacatgagtgcattagtaatgactcttatgtactcatgcatggatctttatgcaatttttttccactacccaaggtctaccttagatactagttgtctgaattgagttactttgataggaaaaatacttcattacctaaaatcatttttcatagaactgtttcagaaaacctgactctaactggtttatatacaaaagaaaacttactgtatcatataacagaatgatccaggggagattaagctttgggcaagggctatttaccagggcttaaatgttgtgtctagaattaagtatgggcataaactggcttctgaatccctttccagagtgttggatccatttccctggtcttggcctcactctcatgcaggctttcctcttgtgttggcaagatggctgccaactcttggcaattcatacatccttgtttctgtctggtagagagtttgcttctcaaatggagcaaacaaatttgattattttttcattgttaaataggcaacatgaccagaaaggatggaatggcttaagtaaactaagggttcacttctagagctgagaagcagggtcaaagcacaatactgggcaattcagagcatggttagaagaggaaaggggagtctcaaagctggagagtttaccaacaaatattgactgcagtgattaaccaagacatttttgttaactaaaaagtgaaatatgggatggattctagaaatggggtatctctgtccatacttctagaatccactctatcagcatagtccagaagaatacctggcagtagaagaaatgaatattcaagaggaagataaatgcgagagggcaatcctttactattctcatatttatttatctctcattctgtatagaattcttgccgccatcccaggtctagccttaggagcaaatgtagtagatagtcgaataataaataacttaatgttttggacatattttgtctacttttgagaattatttttaatatgtaaattctctcaaaagggtcaggcacctagttattattttttaatgattatgtgaaagttgaatataatataccactaaaagtgacagttgaaagtggtggcataggatggtagggtagaaatttgggagggaaaaaagaaattgggagggtacaggcaacaggagaaaggaatcaaaccacagaaaaatacaaagggaaacttctgcttcactattcagacaaagacagccctaatgacatcaccaacagtcaaagcaattagagaccatacctaatattgtttaaattctagatgtaggctaacaatgaaaagtatttgccaaactgaataaaactgtcatggttaccttgaaaaaaaaaaaaaaaaaaaaaaaaaaaaa

SEQ ID NO: 1690 - DNA, 2326 bp, Homo sapiens
ctaccgggggtcccttgctacccatatgtgtgaagaaaagggggaaatgaaagccctagaacccacactgcagtgggcatgggatcatcctggaaccaggagaaacgaggttagggctaccaccttaaccgcccaggtgctggctctgcgtgaatatcttaggaaatgcaagctgaggacaggtcacaatttgggtctgcagcagaaatgctttcagaacagacagcagcgctggggacaggatgggaatcaatgaatgtacagctggatggagcagagccccaggtggaaaggggaagccaggaagagcggccatggagaacagtaccaggacctctggagcacctgtgctgtgaccttgaagaggagccacagtcccttcaggagaaggctcagtctgctccctgggttcctgcaattccccaggaggggaacactggagactgggagatggcagctgcacttcttgcggctggatcacagggcctggtaaccatcaaggatgtgtcactgtgcttctctcaggaggagtggcggagcctggacccctctcagacagacttttatggagaatatgtcatgcaggaaaactgtgggatagtagtctctctgagatttccaattcccaaactggacatgctttctcaactagaaggaggagaagaacaatgggtccctgacccccaggacttagaggagagggacattctgagggtcacatatacaggaggtggaagtgaacatgagggggatacccctgaactagaagcagaacctcccagaatgttatccagcgtgtctgaagatactgttctctggaacccggagcatgatgagagctgggattccatgcccagcagctccagaggaatgctcctggggcccccttttcttcaggaagatagtttctcaaacctgctgtgtagcacagagatggattccctgttaagaccccacacatgcccccagtgtgggaaacagtttgtatggggttcccaccttgccaggcatcaacaaacacacactggggagagaccctacagctgcctcaagtgtgagaagacctttgggcgaagacatcacctcatcaggcaccagaaaacccacctacatgacaagaccagcaggtgctctgagtgtggtaagaatttccgatgcaactcccatctggccagccaccagagagtgcatgcagaaggcaaatcctgcaaaggccaagaggttggagagagccctggcacaaggaaacggcagcgtgccccaccagtgccaaagtgtcacgtgtgcactgaatgtgggaagagctttggccgaaggcaccaccttgtgagacactggctgacccacactggggagaagcccttccagtgccctcgctgtgagaagagctttggccgaaaacatcacctggacaggcacctgctcacccaccagggacaaagtccccggaacagctgggacagaggaacatctgtcttctgaaatctgtttccactacagctatggtcaagtctatcagccggtgctaccaggagtcactgccagggctgccgttctcctgaaccccagtggccagaatcataagccctgaccccatccctagaaagatgaggtcccagcaatggccagagcatttctcaccagttctgtgagatagcacataaaaatagagttctttgggcaaaacttttgggaagcaatgcatcctacatgggctgatattcagcctgagctgttctcaagaggagagtggtactggcagtttatggctgaaatccattctgattggttggagtctatgctataccagttgttaaacattttgagtatcactcttgcatactgttactattatattttctctatatatagacagaaaggccattttagaatattaaaggctctgaaaatttctgcagtagacccaactgaagtttctattaaggcagtgtttcctaaatgtatttgacctcagtatcctttctatttacatcccacagaactggtgactatgaaacactctggtgaacactgggttagagagtaacaaggaaacaagagatagtgatcaggcatccagagcccccttttttatccatatgaaagccaggggggccagaccttgttcatgtgtgggtctgtcttccttatgccaatcagcagtatatacatcacctctcaccctcacctgctgaaaaaataacctttttacccattattcctactcccttcatcctgcacatacatatatccagctgagagatcacactacaaggctaagagatgatctaatacccccaaatagccctggcccacacagaaaaac

SEQ ID NO: 1691 - DNA, 2100 bp, Homo sapiens
gtgctcagagagagagagactaagacggataacgcgtcatctcgccttcccaaattttcccccctcgctagaccgggtccaaaacctccatccggagccggcaggagaggagaacgatgtttaactcggtcaacctgggcaacttctgctctccgtcgcgcaaggagaggggcgcagatttcggcgagcgagggagctgcgcctccaacctctatctgcccagttgcacttactacatgcccgagttctccacggtctcctccttcctgccccaggccccctctcgtcagatctcctatccctactcggcccaagtgcccccggtccgggaggtctcctacggcctggagccatccggcaagtggcaccatcggaacagctactcctcctgctatgcggcggccgacgagcttatgcaccgggagtgcctgcctccttccaccgtcaccgagatcctcatgaaaaacgaaggctcctacggcggccaccaccaccccagcgccccgcacgcaacccccgccggcttctactcctcagtcaacaagaacagcgtcctgcctcaagccttcgaccgtttcttcgacaacgcctactgcggtggcggcgacccgcccgccgagcccccctgctccggcaagggcgaggccaagggggagcccgaggcacccccggcctcgggactggcgtcccgggctgaggcgggtgccgaggcggaggctgaggaggagaacacaaatcccagctcgtccggttcagcccactccgtggccaaggagccggccaaaggagccgcccccaacgccccccgcacccgcaagaagcgctgcccttattcgaaattccagatccgggaactggagcgagagtttttcttcaacgtgtatatcaacaaagagaagcggctgcagctgtcccggatgctgaacctgacggaccgacaagtgaaaatttggtttcagaacagaaggatgaaagaaaagaaactgagcagagaccggctgcagtatttctcgggaaatcctctgctgtaacctgcagaccgggcccttttgggggcggggggaggggaaaattattttattttatttttattttttattttctaactcgtcttctttccgccggtggaaaactggactgtggccagggctggcccccaccgctgtggccggcactccattccggaacctcctggaccctctatctgactctcgctgtgggacagggaccgggcctggaaagggggtgaagggaagtgtctgatgcacggcgagtgaacaccgttggcgccgaggccaagactttgatttaaaagaaaacacacctcggcgacaatgtcttgctgctcggattaggtgggggaggggcgacagtagtgagcgcctgagccgaacaatcctcgaactaaaagccttcccttgcccatgtgaaaagatccgctaagacagcatgtctgccagcggaaacttctcgagctcccccctctaccccgccccaccttgccccactactttagggggcagctaaatgtgatcctgccttgctgtgaaatttctgtaccttcaacctggtgttaggtgtgcaaagtccgtgtcctacctccgtcttcgccaaggccccgcccgagcctagttgttctccccctgaatgtgtagaaccttcctttgaaatttcttaatcggtgcattgaggtttccacatctttttccaagcagtgccccacttcatggatttatagctatagtctatgcagtcgttacctcttttttttttttttttaagaaaattgaagattggggtggtggaggcagtagggagatgggattgggcacctcccccgtgctggggcctggatttttgtaaataaatttcccaagcgtttctttccacctggagggaaagggggggacgcccccagtgagattcaaatcacgcatctctactcctctgcgtgagtgcgtgtgtacatgtgcactccccaccctgctcccttcccagagggattgctgtgaaatttttttggtggcaaataaagataaatttcattctgttcaaaaaaaaaaaaaaaaaaaaaaaaaaaaaaaaaaaaaaaaaaaaaaa

SEQ ID NO: 1692 - DNA, 10923 bp, Homo sapiens
attcatttcctgagaactgcagagagccgctgagaggctctgcgtgtgcgtgtgcgcgggtgacgccgtgtgtgtgcgagtgtgtgtgtgtgtgtgcgcgcgcgcgtgtgagagagagaaagggagagagagagggggactctgtgtgagggaaagaaaacaatttctcctgctctgcagcttctgttcaggatcaatgtgactctaagaacaaatggatgaatgaatatccatatgaagagaaaaacaataaagaatatcaacacctttgagaacagaatgttaatgcttgatgggatgccggcagtcagagtcaaaacagagcttttggaatctgaacaagggtctccaaacgtccacaactatcccgatatggaagccgttcccctgttgctaaataatgtgaaaggggagcccccggaggactcgttatctgtagatcacttccaaacacaaactgagccagtggacttgtcaataaacaaagccaggacgtcccctactgccgtttcatcctccccagtttccatgacagcatctgcctcctcaccttcttcaacttcaacctcttcatcgtcttctagtcgtctagcctcatccccaactgttatcacatcagtatcttcagcgtcatcttcgtcaacagtattaactccagggccccttgtggcctctgcatctggtgttggaggccagcagtttttgcacattatccatcccgtaccgccttcaagtcccatgaatttacagtctaacaaactgagtcatgttcaccgcatccccgtggtggtacagtcggtgcctgttgtctacacagctgtaaggtcacctggaaatgtgaacaacactattgtcgtgccgcttttggaggatgggagaggccatggcaaagcacaaatggacccccgaggcctatctcccagacaaagtaaaagtgacagtgatgatgatgacctgccaaatgtgaccttagatagcgttaatgaaactggatctacggccctttccatagccagagcagtacaagaggtacatccgtccccagtatcaagggtccggggcaatcgaatgaataatcaaaagtttccttgttcaatttcaccatttagtattgagagcacaagacgccagagacggtctgaatccccagactccagaaaacggcgtatccacagatgtgattttgagggatgcaacaaagtgtacacaaaaagttctcacctgaaggctcaccggaggacacatacaggagagaaaccttacaagtgtacctgggaaggctgcacctggaagttcgctcgttcagatgaactgacgaggcattaccgcaaacatacgggagtgaagccattcaagtgcgcggactgtgatcgcagcttttcccggtcagatcatttggccctgcaccgccggaggcatatgttggtgtgaggaatgctacctgtccagctgagcgtaagagctggatctcttagcggcacccaattcagcagggctgaatccccttcacagtgttaacacaaaagggcatcaccatcccacgatgtctgaaaccagagcaggaaaaagaaggcacacttcttttggtctgaaggtaacccccatcatgactagacgagaaccgtctttacccgggcctgggagctcagtgacataaatgctgaagagacaggcattgttttccgtgctgtgtcctctgccatttaaagatgtttgtagcttgtacattttctgagctgtcagacattttgttattgataccttaaaggtcacctaccacaaattgatggctagagcaagaccttttaaatttggatgaatctcccatcatcccatcccttaacccctttttacagaaattttagttacaatctgagtaagctagaacacacatccaatctgttaccagcaagcagcatgaaagtagaaacgaagaagcagatggagaggtcccattacctgcaaagaaagggcactcaggcagccctttgcaatcgcgatggcagccactagatatcactctcaacttgtcattctgccatgccctgaagaaaaccaacattgaatctttcatttgtttgtcgttgattgtttttgttttgtttcgattctgttttgttcatctgttcgagcagaggggcagttgaagtctcgtcctggtctctgccctggcatggactggcacagaggtgttctgtagttgaataggaagagcctgtctaaaaaactactgccccacttcaaattgcagtgttctgtcacctaggcatcatctcttcctgcccctagtatttgattacaaggaaccaggggaaaaaaactttcttagacacactggcaccaaggtaagaggtggggctgcccaggcaaagtcagtgaacatgaaaactcagacaaagcagagatggaaataatgcgcctcttgaggagaaaagcaataatgaataaaaggactttcctacaataacttcactgaggactcacgttaccaattttcatacttactaaagggattgtaaaaaacaccccagcattttaggtgtcttggttccatttacagcactgaggtaatctttctgctgtttgttgtcctgcttggttgagtaccacaattaaagattatgctccccttttcttgtttgaaaacagttatttggtgactagaaaggcaagggaggcatagccgggaattaactcttcggttaatgggtcagttctccttggaactgaatcagtggaaagagaatgcttcccatagaaagcccgacatggtgctagtttcctctcttggagagccaaggataagtgactctccaataggttcttctataccgatttcattttctaaactgtatcaggacccaggtgtcctgcattggcatctgcagggatattgaacccactcatcctgtgcagaggatgagaggaaggtgttagttccatcagccccataaaattatgaacctttttgcaactaggaacatatacagtaaacaagcaatacatcaccaacgagcattctttcagaaaaattaccatatttttgtccccaccacaagctgggtttttttccagctttctgtggctgaggggctggtgagattttttgttgttattgttgttgttgctagaattttttatagcttagatataaaaggtctccaacaaagacctttgcaatatattttaattacaaacacttgattttgggaattgcacatattaacctcacaatattactagctcatttttaaatgtctggacattctgaaataatttccggttacagaattaccctttttaggatcatcttctaattcagataatcttattctgatgaagcgagaactatgaacgttgaaacaaggacaatttgtgttggatggtattcaaaaggaattttttaaaacattaagcaacagtgtaatgattttcaggtcaaattatggcttcacaaatatgtgctctatattgtctgccaggtctcaaaaattcatcaagcaatttccctccaacaagggctgcagttctagtgataaatagcatctttagctgcacagtctactactcatcaaccagtgggttttttttagcacctggaaagtttttttgtactatatgcaactcctacttcacattgcctgtgaccattcagaatagaaaaaggtctgttgatgcatgccagtgctggttactagtcagtgacagagaacacagagagggacaaacacagccatgaaccccctggcactagtaccagcacctagttggcaagtagtgggtgcatctctcaagtgaagtgtagatttgtatttagtcctgcttgctctcataaaaagagccagttcttttctctgctgaaagatgtcttgagagtattacaggtagacttggtttttagaattcataaaactgacaggcaggggaatcttcctgagtgacagcttggtttaaatttagcacagaactagatgagttgcacttttctaataacataggatggatttggggaagggaacattttccctcatcctctgaaagtggaaaccagactgagatggtaagttaactgataaaacctgtcagcattccatcattttccccttttgacgtatcagtacttctaagaagggatctaagcacaattaagtgaattgagtccctggtctagcctcaggaactgaaacttctttggggcttgtcttgagacgtggcaaattctccttggtgagttttctaaaagtatttccccatggaaaggagaaagtggtttgggacagaaagaaatggaatgtcttcagtcatggaagagcctccatttcatctcatgtccatttctagcctctttcaaaaagcacagtgcatcatgagcaacagaaaagcagtagaatcctaaaggacataacagttgttccgtaactagaagcattctttgattttaaatttgaagctgttcagtttgcagctggggatatgtgcatggttgggaacttatacacatagagccattaactacttaagcagctgcagtagacctgattttctgtttgcagtatagagattgatttcaagggagttacattatttgaaaagttatgactttcagcctttgaggttttaagaatcccttttcatggtctgatcttaagttgtttgaaaaaagattcacgcttctgcatccacctctgccctcattctgtcaattgtgtgtggactctgagaagcctgcttgataacttgtcttaagttctattaaggcagttagactgagatttctaatgacttcaccataaagattatacttctgcctggcgtcgtttctataaaacactataggacatttgttttcaaaagcagttgagtaacagcaacataaaccacattttttaaaaaaatgagcacttttcattcacttgaaagcttaagtgggaaaaaggaagatgattgtcaggggaaaaacttacaaaatgctacagtgtttacaaatgccagttccaggtgattagaaaggccgttttcattatggttcagatttggaatagcttatgcaaagattgtgttcatttttatacaattctttttaactttaaattgccatctgtgttttaaacataattctgcactttggaatcagttcattagaatgataacatttatatggataaagatgcagtattccttattctgtacttgatttattatacttaccaaagctgcaactgaataaatctggtgaggtgaggccttcaaaatgtattaatacgcctttgttatgttgttatgactgcttagaaatgtagccatgatgttgttctaaagatgtcttaacatttatagtgaggattgacagaaattaagcagtgttaagaataccagcatccatgttacagtctgcgtataagggactgaatgtgaggtaactcttatgaatcataataggcccagaaagccttaatattcatagttcataatccagtctcagattttgctcttcaatgttgcctgtaaacttagcaggtaaatgtattctagtataaaacatcattgaccaaatctcttcctttagtttttctgaggtagtgcatcccattaaaaaagtctcttcaattagatttggctttagtttagaaaggggtttggtaagtcatgtcttccatatgacatttctactcatccccacactgccttccacttaacctgtacagacagccccaacacatgcacatgtgtgtacacaactgtatatgcagcagccagtgggctaacaaatatcagcaaagaacttttttaaaaagaatttgtaataatccgtgctgtctagaaatgtgagttacttaccttattaggaaaccggcttataatactatatatgactctgcctgcattttatagttaagaaatgtacataaaaattgctatattttcacagtttcattataatgtctgtttagtaacccatgtccactgatactttaaatatgctaattactgagcaattgcaatagaaatccagattttcataagaaaatgaaatagaaggatactgcatctttaaaaaatagagtgaagatattttactgtattcgtaacatatgtgatagtggaaaaagtattttcaaactcacaaattttacagaggttgtaaatagtttgatgaagtatgttgggaaagagagcttctagttttcatcacaataaaaagaaaaaacttgttcagatatgccttgtatatcttacacacaatgagtgaaattgccatgggaactctgtccaactttgtcagagcatgctcttcgtgttctgttcaaaatagagtggccacttgtcatggtttagccaggatggtttaaaatataatgaagtcattttaagttgcagacaactgattccaaactagtaatgtcttttcctgaaaagggcaaaacagctgcacaggattttgcttgtactaaagaggagcatcttacaattgttctcttttctcagttatctccctcctcaacagagtgtgaacaaccatacaggtgtttattcttgttttattccagggagactgcttttaggtataactacatgttgacaagattaagtgctgtggatatggccacgtgttaaaggaatctatactcgcaataggaataagctaatgcccattttcagaaataaattaaatgctgaaagtgcctgtcagtaaaccttatgaccaatgagatattcctatacttttacacagcaataattcttaataagactgggttttttcctgcacatgtgaacacacacacacatacacacagagagagtaaatacatacacatagtaaatcaaatctgttcacatgcccacaaaaaacgcttttatagctttcaaatatacctaatcttgtttacattaacatttcttaatttgatctttctaacttgcagaacgttaagaacacaaatctgaacattaagtttatcttcagtgaacactattgcatatggtaattataatttccagataaaaagttgactgtcatttgccccaaacttatgaaacagtatgtatgattcaaaaagttttgctcagttaaaaacaccaatttatttggcgcaaaagactgaaggatatttgtttgcttgttcattttatccactcatatcaaacgcacaaattcatctttacatttcttcattcccctttcccctaatatttcctattatcatcttaagaatcattttggaatgaatattgacagaatcatttctccccaaaaagtctgttgaagtaccactgacacttagtaagcctagcctttaaccatctttgcagttagtcctaaaaattaccagatgcacattcagaagctcacaggttttttcctgtaattactgtactgctaaaagtggagtcatggatagaaatatacaatgagactatatgaatagacatgaaccctggaaattctccaaccctgccatctcagagcacaaattcacccaaacaagctactgaggctatcagtaaaattatactcatggagagtcacacatcgggtaagggcaattttaaaagtaggactgtgattaaacattcaggctttagacttccatgatggactcagaccacaggcctcaaaaaaacatccactgttttctcctcccaatgttagaaagaagaaaagggagacggaaatgtaccaggataagggggtaaaataaccaattaagtgtcaaaggaaagctgctgggttccttaatctcactgaagtcaagtcttctgactgggcttcttaccatgtgttgtctgaaaaaactaaagtaccttgaaaggttacacattcagcaaaccatgaagataatagctattctttattaaacactgtgtgccaagcaatagactaggcaatttttagatacgttacctgcaacctgtacaacatttctacactttatggatgggaaacggagacatgggaagtgtggctgagttgttcatggatgtagaaatagtaaacggcagagtaggaaagtgaaaccgcctatctctgacctggaggtctgcctgtatctttcccactccaccacactgcacgtgggtgtcccgaaaccaccttcccagattcctgactctcagtaattttattatggacaacatgcatgagtagtcatcatatttttcaagtgaaatatcgggacatgatataacacatgacttaacaatggtactgaatatttgaaatcaggcctttcccggaaaatcatgcatgaaggatcattataaacaaacaatagcaaccagttgtctccccgaacttgtcacttttctcataaatgtctggcctggagctccaaaatcatccaaatacttagtagcattttagcctgagtacactttctcagttcctcaactctttgtatacctttccaccaatatagacattctagaatctgcttcagatgcatttgaaattttcacccccatggaactagtgattaatatcagagcccactcttgcagttggtaatggggtggcaatcaaacgttcagatgatgataaaggagagataatggataattctttttcagagttctcacttaacagctctgttgtggaatgttttaaatagtcttataaataatttgtttatagtattgttgttagtttaattgaattttatgtaagaagctgtccaacatcagagaaatgaaattcctcccactttctgtgtagaacaaggtctctgacagtattgattcatggaagtactaatggacttagaaaacattaagagaatgtcatttctcatagtgtttctgtttctgaaaatgaatctcctgaattattatctttctccctgttacttggctggggaaagagatagaagctgtataaacaaattctcttccatgctcaaagcaagtgttccatgtgcacaacctgctgcagactggggcccttctcagttaattgggtttcacaagcaataatttctccacaacaaaaaccacaacttgaagtgagttgaaaagagatcaatagtggaaacagtcgcctcagtactttttctttctggatttcatctctagaaatttgaagtgtttgagacagagtccaccctttgtgcaaggcgagaaccaatgaatggactccttgtgtgaattattgcatcttcttccaaagcaggttcatcaagactttcacagagattcatttttgttgagaagtaagggttaataggaggatagaatttggatccaaatctagtgataaaagtgtccaagcaatcaaaaagtaagatattttagggacataccaacatcttccctttctgctaatttcatgctccaaagatatggcaaaaaaaaaaatcataaaaagtgcttttgccctacttgtgttctagttttcccatggcagaattttgtaattacatccagaatatagtgtatattttgttcctcaaactttattacattggatggatattgttgaactggggcactggtgcctatattcaaggctctttcctatcaacgtgtctgtccacgatttgttgtgtttaaagcttcattttgaaaaatcactgtccccctgtggggtagtgactgtattgttttgttcatgtctatgtgggacacattgcatcacatggcaaaccaactctctgtggatgtgagataagtacttataaaaccagcttgaaaacatcgtcttatgtattatgtcatcctgcatcataatgcaattatgtgtatcataacatgctcatttaaaaaaagagaaaccagcaaattcatgtttgtccatagaagaatgtactcagaactttgtgttgtgaaacgatgagaacagaccacctttaagatacccacctgccacttaaaatgacttagttataattagtagtagtctagacgttgttcttggtgtgtgggggtcaattctaacgtcatgttcttttgaataaatctctcagtcatatttgaaaaaaaaatacatgggaataaagaaaaatatcatctttggccaaatcaagcaggcatcttttttcttttccttgacgtttagctcattatacgtggtgattggatcacgagatctgtccgtgtgaaaatacagaaacatcctttagtttacaaaacagttattctaggcttgaagcctctgaacagcaaattgaatagatgggctgcatctgatttgctttatggatgtaattttacaaaacactcttgggtctctgaccccagggagttaagagtgcccagaggaggtcctacacattaaaggataaagccccccagtgatgctggcaagcaaatgtgttgagttcttaaatcttcatttggttttctgttcaggattttaattgcaaatgaatttatttctccagtttatctaaagacctaatttcccaatagtttcctctgcatttatatactctgtagtgtttaggcaaccctgttataagtttattaatattatgtaagtgttgttcttgtatttatgtatagtgtatgtattgtaaatatactcagagcttttttccttttactgtaaaatggtgatttttttgccctatgataatgtaaagggagaccctcctaatgagattctctcagaggatgattattccagtctattctcagagatttaaatgaacaagtgttattgtttttaatggtgtctcagacatattctgttggtgcattgcttttctgtattcaactttcctatgaattgagctgtgaactgaaatagagtttaaacctttaactgtatgcatttgtataattatctgaatgaaggcatgaaggttaaataaagcattttgtatggaacaaaactccctaactgactcagacactttggaaatcatagttattaaccattctaattaaacctttgttatgaaaagttttaaaaaaaaaaaaaaa

SEQ ID NO: 1693 - DNA, 1164 bp, Homo sapiens
ctgccctagtggcctatgtcccttgctcggggccatggagacactgcggccagtacggcggcgcctctgtctgaagaaggggaagtgacctccggcctccaggctctggccgtggaggataccggaggcccctctgcctcggccggtaaggccgaggacgagggggaaggaggccgagaggagaccgagcgtgaggggtccgggggcgaggaggcgcagggagaagtccccagcgctgggggagaagagcctgccgaggaggactccgaggactggtgcgtgccctgcagcgacgaggaggtggagctgcctgcggatgggcagccctggatgcccccgccctccgaaatccagcggctctatgaactgctggctgcccacggtactctggagctgcaagccgagatcctgccccgccggcctcccacgccggaggcccagagcgaagaggagagatccgatgaggagccggaggccaaagaagaggaagaggaaaaaccacacatgcccacggaatttgattttgatgatgagccagtgacaccaaaggactccctgattgaccggagacgcaccccaggaagctcagcccggagccagaaacgggaggcccgcctggacaaggtgctgtcggacatgaagagacacaagaagctggaggagcagatccttcgtaccgggagggacctcttcagcctggactcggaggaccccagccccgccagccccccactccgatcctccgggagtagtctcttccctcggcagcggaaatactgattcccactgctcctgcctctagggtgcagtgtccgtacctgctggagcctgggccctccttccccagcccagacattgagaaacttgggaagaagagagaaacctcaagctcccaaacagcacgttgcgggaaagaggaagagagagtgtgagtgtgtgtgtgtgttttttctattgaacacctgtagagtgtgtgtgtgtgttttctattgaacacctatagagagagtgtgtgtgttttctattgaacatctatatagagagagtgtgtgagtgtgtgttttctattgaacacctattcagagacctggactgaattttctgagtctgaaataaaagatgcagagctatcatctcttaaaaaaaaaaaaaaaaaaaaaaaaa

SEQ ID NO: 1694 - DNA, 7001 bp, Homo sapiens
ccaaaacccgggtctctccgcgtggccccgcctccaggccggggatgtcccccgcggccccgcgcccatggtcctgacgctgcttctctccgcctacaagctgtgtcgcttcttcgccatgtcgggcccacggccgggcgccgagcggctggcggtgcctgggccagatgggggcggtggcacgggcccatggtgggctgcgggtggccgcgggccccgcgaagtgtcgccgggggcaggcaccgaggtgcaggacgccctggagcgcgcgctgccggagctgcagcaggccttgtccgcgctgaagcaggcgggcggcgcgcgggccgtgggcgccggcctggccgaggtcttccaactggtggaggaggcctggctgctgccggccgtgggccgcgaggtagcccagggtctgtgcgacgccatccgcctcgatggcggcctcgacctgctgttgcggctgctgcaggcgccggagttggagacgcgtgtgcaggccgcgcgcctgctggagcagatcctggtggctgagaaccgagaccgcgtggcgcgcattgggctgggcgtgatcctgaacctggcgaaggaacgcgaacccgtagagctggcgcggagcgtggcaggcatcttggagcacatgttcaagcattcggaggagacatgccagaggctggtggcggccggcggcctggacgcggtgctgtattggtgccgccgcacggaccccgcgctgctgcgccactgcgcgctggcgctgggcaactgcgcgctgcacgggggccaggcggtgcagcgacgcatggtagagaagcgcgcagccgagtggctcttcccgctcgccttctccaaggaggacgagctgcttcggctgcacgcctgcctcgcagtagcggtgttggcgactaacaaggaggtggagcgcgaggtggagcgctcgggcacgctggcgctcgtggagccgcttgtggcctcgctggaccctggccgcttcgcccgctgtctggtggacgccagcgacacaagccagggccgcgggcccgacgacctgcagcgcctcgtgccgttgctcgactctaaccgcttggaggcgcagtgcatcggggctttctacctctgcgccgaggctgccatcaagagcctgcaaggcaagaccaaggtgttcagcgacatcggcgccatccagagcctgaaacgcctggtttcctactctaccaatggcactaagtcggcgctggccaagcgcgcgctgcgcctgctgggcgaggaggtgccacggcccatcctgccctccgtgcccagctggaaggaggccgaggttcagacgtggctgcagcagatcggtttctccaagtactgcgagagcttccgggagcagcaggtggatggcgacctgcttctgcggctcacggaggaggaactccagaccgacctgggcatgaaatcgggcatcacccgcaagaggttctttagggagctcacggagctcaagaccttcgccaactattctacgtgcgaccgcagcaacctggcggactggctgggcagcctggacccgcgcttccgccagtacacctacggcctggtcagctgcggcctggaccgctccctgctgcaccgcgtgtctgagcagcagctgctggaagactgcggcatccacctgggcgtgcaccgcgcccgcatcctcacggcggccagagaaatgctacactccccgctgccctgtactggtggcaaacccagtggggacactccagatgtcttcatcagctaccgccggaactcaggttcccagctggccagtctcctgaaggtgcacctgcagctgcatggcttcagtgtcttcattgatgtggagaagctggaagcaggcaagttcgaggacaaactcatccagagtgtcatgggtgcccgcaactttgtgttggtgctatcacctggagcactggacaagtgcatgcaagaccatgactgcaaggattgggtgcataaggagattgtgactgctttaagctgcggcaagaacattgtgcccatcattgatggcttcgagtggcctgagccccaggtcctgcctgaggacatgcaggctgtgcttactttcaacggtatcaagtggtcccacgaataccaggaggccaccattgagaagatcatccgcttcctgcagggccgctcctcccgggactcatctgcaggctctgacaccagtttggagggtgctgcacccatgggtccaacctaaccagtccccagttccccagccctgctgtgacttccatttccatcgtcctttctgaaggaacagctcctgaaaccagtctccctgggctgagacaacctgggctcttcttaggaaatggctctccctccccctgtcccccaccctcatggcccacctccaacccactttcctcagtatctggagagggaagggaagtcaggcttgggcacgggaggttagaactcccccaggccctgccattgggttgtctgtctccgtcatggggagggtccctgctcagttctggagacactggagttggggtgggggtggttctgcattcccttctcctgctgatagcagtcagcttgaggaggatgaaggaaggcagcctcagacaggaattaaggcaatgcccaggcgggcctgggcactgtattctgagcaaaggcctgggcccaggagccagccagggatgagtgccatcatggctctccactcagactgtgcctggcccctgcacttacaacttcctgccgctctgtggccttgccctgtaatcactcagtgcccttagctagcctgactaagtcccagatcccctacagcttccttcggtgtggtatcttttgccacatccagggcgagggttgaggcaaaccagccctccctctgacttccttgtcactgcagccagctttgctgcacttgctggtgcacaggagcctcctgtttgggcctgggtctgggcatggggaggccgtgcctcaaagcccaccctaccccatgccttggtgctgtgcctcaggctccttcctggtctggcccagctggcttccccagcccctcagccatccagggctacccactgcttactcagggaccaggcagcccccatggcagtaaaagcagcctagacagaacctgcagctctgtggaaagaggcaaagtcctgaaaaggcaaagggttgtcacttagggcagcttctccaactttaacatgcatccaagtcacctgggaatgttgttaaaatcaggagatctggggtggggcctaggactctgcatttcttacagattcccaggtgagctgatgctggtggttaagggtagcaaatctctaaagcacgaagccctcacaaatctttgccatttcccaaacactccgctccatggtctccagtcatcagagcaactctacctggtattatcatccccattttacagataatgacactgaggctcagaaaggttgaggataagcccactttcctgtcattagtggcagccccagatccagacctaggcctcctggcacccagtccactggcagtggaattgctttcctgagaatcattctgaggctgggctattgcttctcccttgcttcaaagaatctagcagcgggggataggattttgcaacaaaaagctgacccagaggccatacagagcaggaatatcccattgccccctcctccactgggttcagagggtaagaaagcaccctccaataaacccaggctccaggccgtgggggctgctgaaggctctttccccgcaagggccaggtgttgacaccttaaagctggcgcccccagccccactcttggctgtgctggccaggtgactcctagttcttggccacatcatcagaaagtcaaaggtctcactccaggtttggggctccttccttccactcccctccctgccagagtctgtcttggccagtgccagcctcgatgctttggttttgaccccacctgatcctcctttcctcatgcagcacaagtgctcaccggggccagagccagggcatggatatgacaagcagggcagcctggacactgccctcacaggacagcgccaataacaatacagtgtctgagtatctccaggggatgatttctggctctttgtctccaatcagtcccactccctcctgaggtccccaagggcagtattcagagaggtttcctgcgttttatttctatttggtataccctccactgttgtccactgccctgtgtggccttctggttgacctctgcccgatcttctgtctctctgagggaatcagagtccagcatccagccccagctggaacagctgaagtcacaagcctcctctaagccaaggccagtgtgttcagaggtgactgccacccatactaggacaaacacagctcagatcaccaggtcaagcacctaggcctggcttctcctgagacagaggactcagaagtggcctttcctccaaagcctgctcagacacaggtctgtagggccagggtgttctgcttggctgggctgcagctgctacccctcggttggggctgagtcagccagatcctccccctacttctccccaagggccaagaactgctcagggacattaaaggtcaaaagtccagccacactcattcatcctttccccaggcccatgaagagaggcatctcattgtagaatgtatgaggaagtgggaagtatctcagagaatcagctaagtttcctaacttgtccatccaaatgtgatcaccacgattcaacaatttggggcattgctgatctagccgttcctagtggggcttgctcaaggttgcacagcgagtcagtagaagccctggctggccccacttggtaccaatccaccaggcagctcagggctcctgcccagcccagcagcttctgttgtctaacgtatggcaggcagactgggagcaggaaaacagagggccccaaagcccaaggcaccagaaggtttgtttcagtttgctgaagctgatttgtaatgattggcactcttcagccaggggagtgggtaggccatagccaaggatcgattccccaaccacagcaaaggcaacactcttcctccagagatcaccaagcccctcttacctccctccctccttcccaaggctggcactaaccaggtaccacattcattgttaaggaatggctgatgactgctacacgtgttgggaacctggttggggctgtgcagtttgggctggaaggagagatgccagccctcgtgctgcctctggtccctgaagtgtcacctctctcaggacctctcctctggcctgtggggttataagtgatggatagcagaaagggagaactgactcctgtcccaaatagctcctctgccacctgtcctgcagtgggcctgtgtgggttatgattctagatcctagacagaggctgggtcagctgtggatggggtggtgccttggtctctcttgactacctcgtccaaagagagcactgcccttagacaagagttgcttgtcctgctgtgggctgggcttccagctgcagacctccagttgcttggtgttcactttgctcctcttgccctctgtcttctggtccaggcagatcaggggctctggggaaactgctggaactcgaggtgaggatcagccttttccagcatcctgtgagagaccagagagagagtttggatttcatgtggggaaccctcaaggcctgtctggagaagtgacacaggatttactggggtgggctggtccaggtagctctcctgaacctcctccttccccaagctgagaagctgagagctggaggacaatatccagggacatggctctggaaaataacttttttttttttaagagacagggtcttgctctgttgtccaggctggagggcagtgacataatcatagctcactgtacccttgaactcctgggctcaagtgatcctcctgcctcagcctccttagtagctgggactaccagtgcataccaccatgcctgggtgattttttaaattttttatacagacaaggtcttgctatgttgcccaggctgatcttgaattcccgggctcaagtggtcctcctgcctcagcctcccacaggatcgggattacaggcaagagcctccacgcccggccatgaaatataattcttaatatcatacaggaaaaagtcagcgggtcaagctagcctgtggcccagccacaactagctgacaaagcttcctggccttccctttaacacagttctgctgccatagttccatctataaaatgggaatggagggaaataggggaactgggatagagaacacagccttgccaagcagcaatgttagcctgatccttcctccacctagctcgccatctcgcccttggaaaatggctcctggaggattaggcagccatctgcaaggagaggggcaacctgggacaagacacccagagggtaaggattccaggaatgaagctgccatttctggttgggaggagaagaggaaacttttaagagaaagggctccattatgagcatgggttcagggccctgcattacccaatcagaacagccgggatgagcaggaggccagctcccaggaggaaggggaaccccttcataaagttcagagtggctgggtagagtgagttgaagatgccggaggccgtcagcatggccaggctattcacacaggccacagcagaaaagagagcacctgtgaagaaataaataccatactctggagtccgaaagggccatattccaactctggcaccaccacctcacagctgtgtgaccgggagtagtcacttaacctatgtctccccttcctcaccagtaaatcctgctacatcatgtactgtgacaaggattcagtaaggtcatatgtggacagtagctggcacagaggggctactaaacaaatggctgctattaaatccacattaaaagtacatgtgatctgacagaacccagcacataaaagaaaaaaaaaagt

SEQ ID NO: 1695 - DNA, 6616 bp, Homo sapiens
atcgatgctagacagacagtctttttactgctggattgtgcaagatatttaaccctattttgtttgaattatgacttaaatgtcaaacatcttaactaagaaaagggaaacattttagttttggaagtcagaatgccaaggagaaggaaaaatcttgggggaaatccttttcggaagactgcaaaccctaaggaagttgtcgtatccagtgttgctagtcgtgaggagccaaccactactctaccttccatgggtgagacaaaagttgatcaggaagaactcttcaccagtatctcagagatattttctgatctggatcctgatgtagtgtatttgatgctttctgaatgtgatttcaaagttgaaaatgctatggattgtctattagaattatctgccactgataccaagatagaagaatcatcttcacaaagtttcgttgcttctgagaaccaagtaggtgcagcagaaagtaaaataatggaaaaacgtcctgaagaagagagtgaagattcaaaaatggattcatttttggacatgcagctaactgaagacctggattccttaatacagaatgcttttgagaaattgaactcttctcctgatgaccaagtatactcatttttgccttcacaagatgttaatagttttaatgactcaagtgagtttataaatcctgattcaagtaatatgactcccattttttctacacaaaatatgaatttgaacggtgaaaatttagagaattctggttctactttaagtttaaacccattaccttcacattcagttttgaacgagtccaagtgttttataaaggataacacattggctttggaaagtaactacccggaagattctcttctcagtagttctttaaatgtagcaagtgactccatcgcaggttgtagcagtctcaatcaaaaacagaaagaacttttagaatctgagtgcgttgaggctcaattctctgaagctcctgtagatttggatgccagtgaacctcaggcttgtttaaaccttccagggcttgatttaccaggtacaggtggggatcagaaatctactcgggtctctgatgtgtttctaccttccgaagggttcaacttcaagccacacaaacatcctgaactgccaactaaggggaaggatgtgagttactgcccggtacttgctcctctcccattgctgttgcctcctccgccacctccaccgatgtggaatccaatgattcctgcttttgacctcttccaaggaaaccatggctttgtagctcctgttgtaaccacagctgcacactggagatctgtcaactacacatttccaccctcagttatttctcacacttccccaacaaaagtatggagaaataaagatggaacaagtgcttatcaagtacaagaaaccccagtttctcaggttgtaagaaagaagacatcttacgttggactagttcttgttcttctcagaggtcttccgggatctggaaaatcttttttggcaaggactttgcaagaggataatccaagtggagtcattcttagtactgatgattatttttatataaatggacagtaccagtttgatgtaaagtacttaggagaagcacatgaatggaaccagaatcgtgcaaaagaagcatttgagaagaagatatctcctataattatagataatacaaacctacaggcatgggaaatgaaaccatatgttgctttgtctcagaaacacaaatataaagtcctttttcgggaaccagacacatggtggaagtttaaaccaaaggaacttgcaaggcgtaacattcatggggtaagcaaagaaaaaataacaagaatgttggaacattatcaacgttttgtttcagtgccaataattatgagttcttcggttccagagaaaattgaacgtattgagttgtgtgcatattcttgtgaggatagaagcactagcccaagagacgatgaagatattatctctgaaaaagaagaaaatattttatctttatctttgaagcatctagagttcactgaagagaagaatcttgatgtaaccaaagaaacaatgttacctgagaatgttgcatatctctctaatgcagatttaaacaaaagaagaaaagaaataagtgatatgaatcctagcattcaaagtgctttaattctggaaactccacacatgtatttttctgactctgaaagcaaactacaggcaacagacaaaagtgaaaacgagcaaatagaaatggtggctgtaaaagggtatagtaaaactgacacagatagttctatggagagagtatcacctagtacttgctgtagtgaaaataatcaagaagactgtgatcttgcaaatagtggaccacttcaaaatgaaaaatcctcacctggtgaaatagtggaagaaagagcaacagtaacgaaaaaagcctttgggaaacaaaaaagcaaatcgactttggaaaagttcccaagacatgagctatcaaattttgttggtgactggccagttgataagactattggtcagaggacaaaaaggaacagaaaaactgaaaaaacttcatccgtacaaagcgacaaaaagtataattaccctcagtcacacaaattagttaacagtgtatctgtgaatacagattgtgtccagcaacgaggatctccacatgaaagtgtagaggatggcagaaagtcacagtgtgatgatgcttcagagccactcaatagctataaatatgatgcttataaaaatattgacaaaaactcattcaacattatgggtgactggccttcatctgattctttagctcagagggaacacagatcaagaatgccaaagactggtttaagtgagcccaacctagaaattggaacaaatgacaaaatgaatgaaatatccttatctacagcacatgaggcctgttggggcacaagctctcaaaaactaaagacattgggtagctccaatctaggaagttctgaaatgctgctcagtgaaatgacctgtgagagtcagacttgtctaagtaaaaagagtcatgggcaacacacatcgttgcctcttacttttaccaatagtgcaccaactgtttctggagtagtagaaccacaaacgttagctgaatgtcaagagcaaatgcctaagagagaccctggaaaagaagtaggcatgtgcacccagactgaaccacaggattttgctcttttatggaaaatagaaaagaataaaattagcatttcagattctatcaaagtattaacaggaagattagatggatttaagccgaaagttttcaatattaacacaaaatcagacgttcaagaagcaattccatatagagtaatgtatgataaaagcacgtttgttgaagaaagtgagcttaccagtgcagatgaatctgaaaatcttaacattctttgtaaactgtttggatccttttcattagaagccctgaaagacttatatgagaggtgcaataaagatattatttgggccacaagccttttgttggattctgaaactaagttatgtgaggatacagagtttgagaatttccaaaaatcgtgtgatggatcacaaattgggcctttttctctggggttgaatttgaaagaaattattagccaaagaggaactttagagaattctaattctcctgtgccagagtttagccatgggattggtattagtaacgctgactcacagtctacttgtgatgcagaaagaggaaactcagagcaggcggaaatgagagctgtcactcctgaaaaccatgaatcgatgacaagtatatttcccagtgctgctgtgggtctaaagaataataatgacatacttcctaacagccaggaagaacttttatatagcagtaagcagtcctttccaggtattctaaaagctactactcctaaagatatgagtgaaacagaaaaaaacctagtagtcacagagactggagacaacatacattctccttcacatttctctgatatttttaactttgtatctagtacttcaaatcttgaattaaatgaagaaatttattttactgattctcttgaaataaagagaaatgaaaattttccaaaggattatgtgaaattttcagatgaagaagaatttatgaatgaagatgagaaggaaatgaaggaaattctaatggcaggaagtagtttatcagctggagttagtggggaagataaaaccgagatattgaatcccactccagcgatggccaaatctctgaccatagactgtctggaattggcattaccccctgaactggcttttcaacttaatgaattatttggtcctgttggtattgattcagggtctctaacagttgaagattgtgtggttcatatagatctgaatctggcgaaagtgattcatgagaaatggaaagaatctgtaatggagcgacaaagacaagaagaggtgtcttgtggcaagtttatgcaagatccttccttggttggacatactgggcttgataatcctgaacaaaaatcatctcagagaacaggcaaaaaattactgaagactttaacagcatctgaaatgctacctttattggatcattggaatactcaaactaaaaaagtatcactcagagaaataatgtcagaagaaattgccttacaggaaaaacataatttgaaaagggagacccttatgtttgaaaaagattgtgccactaaactaaaggagaagcagctctttaagatatttccagccattaaccaaaattttctggtggacattttcaaggaccacaactattcattagaacacacagtgcaatttcttaactgtgttcttgaaggggaccctgtaaaaacagttgtagcccaagagtttgttcaccaaaatgagaatgtcacatctcatactggccagaagtctaaagagaaaaagccaaagaaattaaaagagactgaagaaacaccaagtgaactgtctttccaggactttgagtacccagactatgatgactacagagcagaggctttccttcaccaacagaagaggatggagtgctacagcaaggccaaagaagcttatcggatagggaaaaaaaatgtcgccaccttttatgcccagcagggtactcttcatgagcagaagatgaaagaagccaatcaccttgctgccatagagatctttgagaaagtcaatgcttcgctgctgccacagaatgttttagacctccatgggctgcatgtggatgaagctctagaacatttgatgagagttttagagaagaagactgaagaatttaagcagaacggtgggaagccctatttgtctgtgattacggggagaggaaaccacagccagggaggagttgctcgcatcaaaccagctgtcattaagtacctcataagccatagcttcaggttctctgaaattaaaccagggtgcttgaaagtcatgctaaagtaaaataaacatccttgaattagaagtatgaaggtttgtaggttaaaattacttttatttgcagtaattcagtcaattctaccctaaagatgtgttttattataaataatattcaattatgaaacaaaaaaattatgatgtttttcaaaatgcaagtgaggtttgattttttactgaatcaaatgcaaatgttacctgttaaagatattacagagaaattttattgattacaaaatatgtaagaaaattatcagctacagttttaaagtttaaaatgctctgattgtttctcagaaaaggttacctttgtattaattgttgtatgacatttagtaatgtcctaaaagtcttttgtgagaggtatttaaagtgctttgagacctgattcatgccccccaaagggtggtattaaaagaggaaaaaggacatagtagtggtagtaaagaaaaaaaggagatctaacaaaaacacttgaatattttttattttcaaaactaaacacataaaatgcttttattttgccatatcctacaggaaggaagacatgcttttgccctttcttctgctttgtatatgaccttgatcttttaccttttgttctgttcttctgtgtgcattttatggaaagaaagttgggtctgagattatattgtaattttatactttctatagacagaaaggttttcagagaaaaagaaatggttaaatatcttccagatgttgctgccttatcgaaatgcttctagaactgtctgtataagtcgtatttcagacagtactaaatacttatattttatttttgaggcatgtaattttaaaactgcagtaggttaaaattctattaaacaaatatagaaaatattttgtttataattggcctggtgtggtggcccacgcctgtaatcccagcactttgggaggccgaggtaggtggatcgcctgaggtcagaagttcaagaccagcctggccaacatggtgaatccccgtctctattaaaaatacaaaaattagctgggtgtggtggcgtgtgcctgtaatcccagctacttgggaggctgaggcaggagaaccgcttaaacctgggaggtggaggttgcagtgacccgagatcgagatcacaccactgcactcagcctgggtgacagagcaagactccgtctccaaaaaaaaaaa

SEQ ID NO: 1696 - DNA, 1149 bp, Homo sapiens
ggccggcgccccgccccctttactgacaggttgcccacctcccccaacgccaccccgcttcgcagtagacggacagaggagtcgtagcggtcgaggcttttgcggctccggcgtgccggaaagtatgttatgcataaaagtggataatttacatgataaatgaaaatggccaattctttaagaggagaagtactaaaactttataaaaatctgctgtatcttggacgagactatccaaaaggagcagactattttaaaaagcgtttgaagaacattttccttaaaaacaaagatgtgaagaatccagagaagatcaaagaacttattgcacagggcgaatttgtaatgaaagagctagaagctttgtacttccttaggaaatacagagctatgaaacaacgctattattcagataccaacaaaactaattgatcattactactttaatttagctatcagtgccagctgtttatgtataccagatgttgtaaaataattctaacttaaaatgggaagatatacatgttgtgtaaaaaatccctgagctgccctactgaactaaataggtttcaacttctgttcatacggagaaagtatcagcaactttatgctcaattttgatacaaacatagcaatttagctatactaccgatcataaattaatgagcacccaattttgaatgaaaatataatacacttaatcctctaacttaataggacttagccaattatttttagcttatttctccattttactgacaagagaatgccatttaccgaacatttaataagcaaaataatttcttacacacttacttctcttaacttttgaaaggaatcccttattttttcacccaatttggtatattaacagcacatactcaaggttcactacaaaacaaacagttcctggtaatgatttaaatgtagttatagaaataaataatatgtatggagtcattacttctgaccttgaaatagcctgctggtgactggcattaacatacataactaactattcaattatttccattattaatgttgctgctgctacctttgggcctaaaaccaagtcacctgttgtgtatcaattaccttctttgataaaaggaaataaataaataatgttatcctaaaaaaaaaaaaaaa

SEQ ID NO: 1697 - DNA, 2540 bp, Homo sapiens
gcctggcgcgcagagtgcaccttcctgagctcgagcggtccagcgccaagttcggggtttggggttggagcggctggtcacgtggctggcccgcggcggtgcgcggggcgttgggtcagcgggtctgggactggtggcaccggcggcggcgtaggacggaggcgtcgctaggcagcttcgaaccagtgcaatgacgatgccagtcaacggggcccacaaggatgctgacctgtggtcctcacatgacaagatgctggcacaacccctcaaagacagtgatgttgaggtttacaacatcattaagaaggagagtaaccggcagagggttggattggagctgattgcctcggagaatttcgccagccgagcagttttggaggccctaggctcttgcttaaataacaaatactctgaggggtacccgggccagagatactatggcgggactgagtttattgatgaactggagaccctctgtcagaagcgagccctgcaggcctataagctggacccacagtgctggggggtcaacgtccagccctactcaggctcccctgcaaactttgctgtgtacactgccctggtggaaccccatgggcgcatcatgggcctggaccttccggatgggggccacctgacccatgggttcatgacagacaagaagaaaatctctgccacgtccatcttctttgaatctatgccctacaaggtgaacccagatactggctacatcaactatgaccagctggaggagaacgcacgcctcttccacccgaagctgatcatcgcaggaaccagctgctactcccgaaacctggaatatgcccggctacggaagattgcagatgagaacggggcgtatctcatggcggacatggctcacatcagcgggctggtggcggctggcgtggtgccctccccatttgaacactgccatgtggtgaccaccaccactcacaagaccctgcgaggctgccgagctggcatgatcttctacaggaaaggagtgaaaagtgtggatcccaagactggcaaagagattctgtacaacctggagtctcttatcaattctgctgtgttccctggcctgcagggaggtccccacaaccacgccattgctggggttgctgtggcactgaagcaagctatgactctggaatttaaagtttatcaacaccaggtggtggccaactgcagggctctgtctgaggccctgacggagctgggctacaaaatagtcacaggtggttctgacaaccatttgatccttgtggatctccgttccaaaggcacagatggtggaagggctgagaaggtgctagaagcctgttctattgcctgcaacaagaacacctgtccaggtgacagaagcgctctgcggcccagtggactgcggctggggaccccagcactgacgtcccgtggacttttggaaaaagacttccaaaaagtagcccactttattcacagagggatagagctgaccctgcagatccagagcgacactggtgtcagagccaccctgaaagagttcaaggagagactggcaggggataagtaccaggcggccgtgcaggctctccgggaggaggttgagagcttcgcctctctcttccctctgcctggcctgcctgacttctaaaggagcgggcccactctggacccacctggcgccacagaggaagctgcctgccggaggacccccacctgagagatggatgagctgctccaaaggggaactgttgacactcgggccctttgagggggtttcttttggacttttttcatgttttcttcacaaatcaaaatttgtttaagtctcattgttagtaattctgggacaggttattaaaggatttaaatttgaacctggctttctcacagctggacataattctaggaaaataaaatactatgtcgccacttggtcataatcatttagatggtggtgtagggcaaagctgttagaaagattgtagcgttttactctccctgggctttcctccgccttgctgcaacagagaggaaatgcccatgtccacagcttgtacacactgccccctcactatcttgttatccagtggcatgccaaaggagaactgaattagcttctgaggcttctgctgtaaatcagaagtgtatgttagtcaagagtaaacaagatgcacccagtatggtgggagggttttgctgtcagtagctcaaagtatggtgtagaaatggcctcctccctccatcctgggaagtcccagtcccatcctggtgtgagaatcaaccaggctttcctgctccacctgagataaccaactccctcccgtaatcaggaagccaaatgtcaccttcccaaagaaattttattttcacgtagctgaagtgcaaaacatagatgaccatttttaataagcacaatcaaatttttaaccacagaatgtctacaagaattatagctttaaaaaatacaaccaatttttatatttcaaaaatatttgaactcaaataaattaatttcttaaaaagtaaaaaaaaaaaaaaaaaaaaaa

SEQ ID NO: 1698 - DNA, 397 bp, Homo sapiens
accacgccctccacgtgttccactgcctcttctcttctcgcttgggaactccagtctcacctcggcttgcaatggaccccaactgctcctgcgaggctggtggctcctgcgcctgcgccggctcctgcaagtgcaaaaagtgcaaatgcacctcctgcaagaagagctgctgctcctgttgccccctgggctgtgccaagtgtgcccagggctgcatctgcaaaggggcgtcagagaagtgcagctgctgtgcctgatgtcgggacagccctgctgtcagatgaaaacagaatgacacgtaaaatccaggattttttttttctacaactccgactcatttgctacattcctttttttctgtgaaatatgtgaataataattaaacacttagacttga

SEQ ID NO: 1699 - DNA, 1804 bp, Homo sapiens
gtgcagcccgtgccccccgcgcgccggggccgaatgcgcgccgcgtagggtcccccgggccgagaggggtgcccggagggaagagcgcggtgggggcgccccggccccgctgccctggggctatggccatggtgaccggcggctggggcggccccggcggcgacacgaacggcgtggacaaggcgggcggctacccgcgcgcggccgaggacgactcggcctcgccccccggtgccgccagcgacgccgagccgggcgacgaggagcggccggggctgcaggtggactgcgtggtgtgcggggacaagtcgagcggcaagcattacggtgtcttcacctgcgagggctgcaagagctttttcaagcgaagcatccgccgcaacctcagctacacctgccggtccaaccgtgactgccagatcgaccagcaccaccggaaccagtgccagtactgccgtctcaagaagtgcttccgggtgggcatgaggaaggaggcggtgcagcgcggccgcatcccgcactcgctgcctggtgccgtggccgcctcctcgggcagccccccgggctcggcgctggcggcagtggcgagcggcggagacctcttcccggggcagccggtgtccgaactgatcgcgcagctgctgcgcgctgagccctaccctgcggcggccggacgcttcggcgcagggggcggcgcggcgggcgcggtgctgggcatcgacaacgtgtgcgagctggcggcgcggctgctcttcagcaccgtggagtgggcgcgccacgcgcccttcttccccgagctgccggtggccgaccaggtggcgctgctgcgcctgagctggagcgagctcttcgtgctgaacgcggcgcaggcggcgctgcccctgcacacggcgccgctactggccgccgccggcctccacgccgcgcctatggccgccgagcgcgccgtggctttcatggaccaggtgcgcgccttccaggagcaggtggacaagctgggccgcctgcaggtcgactcggccgagtatggctgcctcaaggccatcgcgctcttcacgcccgacgcctgtggcctctcagacccggcccacgttgagagcctgcaggagaaggcgcaggtggccctcaccgagtatgtgcgggcgcagtacccgtcccagccccagcgcttcgggcgcctgctgctgcggctccccgccctgcgcgcggtccctgcctccctcatctcccagctgttcttcatgcgcctggtggggaagacgcccattgagacactgatcagagacatgctgctgtcggggagtaccttcaactggccctacggctcgggccagtgaccatgacggggccacgtgtgctgtggccaggcctgcagacagacctcaagggacagggaatgctgaggcctcgaggggcctcccggggcccaggactctggcttctctcctcagacttctattttttaaagactgtgaaatgtttgtcttttctgttttttaaatgatcatgaaaccaaaaagagactgatcatccaggcctcagcctcatcctccccaggacccctgtccaggatggagggtccaatcctaggacagccttgttcctcagcacccctagcatgaacttgtgggatggtggggttggcttccctggcatgatggacaaaggcctggcgtcggccagaggggctgctccagtgggcaggggtagctagcgtgtgccaggcagatcctctggacacgtaacctatgtcagacactacatgatgactcaaggccaataataaagacatttcctacctgca

SEQ ID NO: 1700 - DNA, 2382 bp, Homo sapiens
agaaggagaaggtcgggttgtagaagctggggtggccggcagctcgctcatcggtgttcgtgggctttgtcggtccgtgcctcgtctctccctggaaagggagggaggcttcgacgtcgagagggagccgctgccgcgttagttccgagcttgaagtcactaggacttctctcaaacttgtgtgctgaggagactcagatgttggcctcagctcctaggctgaactcagcagatcggcccatgaaaacttctgtattgagacaaaggaagggatctgtcagaaagcaacacttgttatcttgggcttggcagcaaggaagaggacaggtagtggagatcctgcaatctgaaaagcagactgaaaggtgacaaagaagctgaagatgggtggtggagagaggtataacattccagcccctcaatctagaaatgttagtaagaaccaacaacagcttaacagacagaagaccaaggaacagaattcccagatgaagattgttcataagaaaaaagaaagaggacatggttataactcatcagcagctgcctggcaggccatgcaaaatggggggaagaacaaaaattttccaaataatcaaagttggaattctagcttatcaggtcccaggttactttttaaatctcaagctaatcagaactatgctggtgccaaatttagtgagccgccatcaccaagtgttcttcccaaaccaccaagccactgggtccctgtttcctttaatccttcagataaggaaataatgacatttcaacttaaaaccttacttaaagtacaggtataaaataagacaaatgtttaaatttagttatgttcacggatagttgtcaattggtctgaaacaaattcgctagggaatctatttgtgtagaactaattaatgtaaaaaaaacagaccatctcgtgttgtgtgcactgtgatataatggtagtatcagtgcaactttaatgattgtacttgatattaagtgttctcaactgagtaacttttaagtggaaaccaagtttagatttggggagtggtaaaggaatcagctttttctattgttaggggaagacagtaatttatcattcatggaccagtagattgttgaaagttggtgaatcggattataagcttctagctaacacaaggattcagaattaggtaaacatctgaaggtttagtatattagaaacacccaaaccagtaatatgctaacctgatgcactgctgaaagaaaatgtgaatttttcgtaataattgcattttagtgaattgtacagtgggtggaaagggcatttggagctcattagaatgagacatagtacaccccaatggccctgtttattaaatgtagtggattaagtgtctgtcaacaaatacaccaaaaccattttttatagaaacagtatttaatggtcactcaatagctttcaaaatacatttttgtattacagcactgcacaagctattctaatagtgctctcgcctcatcattcctgcaaagcttgctttggggagttggataatgtgaaaattttaagtacctaggggagaaagagccatgtaaatatctgtaataaacttgtagcatatgtaaagttttcttggcctttatcttacaaaaatggagtattttagtatgaatttgctgaatgtaagaccgtggactgttttttataatatggcctaattttaaaggtccaaaataacttgtttttaaagtttgcccttgtgctaaagtgccagtgtatgtatgttatacttgatttggttgtaaactatatttcaaagtaaaccctagtgtaataagttttataactaaaaaggtttaagctgctaaaactatttttaagagatgtgaaatgcagtatgggactatctttttttcctcctctaagcccaaagattaactagagtccctccaaccttatagattgttggctttcacaatcttataacctaggatacaggtagtttcgagtatggtgccagtgatgttttgtttttgtttggtcaaggggtaggtgcaacccaatggaccacttatgcaaaagatgtaaactcttgcataatacattgataacatgttttgccaactttaaatgcttaaacataagcgaaaccagtagcaagtatgtgggtcagcttaaaaattttgattgttaatgccctattttctaatttggcacctcttgatgcctaagcaggtaagcagatgcctaagctgtatttctccaaataaatcaagatgaagtactgcccaagttaaatattgatagcctaaagacaagtttatgtagtacttaatgtacatgatatgaatgtgaagcataaaattaaataaaatttttccccattaaaaaaaaaaaaaaaaaaa

SEQ ID NO: 1701 - DNA, 4248 bp, Homo sapiens; identical to SEQ ID NO: 1281

SEQ ID NO: 1702 - DNA, 4788 bp, Homo sapiens
tctcgctccggagccgctgcacatttcggaatcttctgcggcttgtccatagtgtgaataaaaactaaatcacatctataattctactgaactggtcatacagacgctgccatatatgtcacagtacactgaaaaggagccagcagcaatggaccaagaatctggtaaggctgtctggcccaaaccagcaggagggtatcagacaattacaggcaggagatatggaagaagacatgcttatgtcagttttaaaccatgtatgaccagacatgaaagaagcttaggtcgggctggtgatgactatgaagtgttggaactagatgatgttccaaaggaaaattcctcaggttccagtcctttggatcaagttgattcttctttaccaagtgaacctatatttgaaaaaagtgaaacagaaattcccacttgtggttcagcattgaatcaaaccactgagagcagtcaatcctttgttgcagtacatcacagtgaggaaggcagggataccttaggaagcagtacaaatcttcataatcactctgagggagagtatattccaggagcttgtagtgcttcaagtgtccaaaatggaattgcattggttcatacagactcttatgatccagatggcaaacatggagaagataatgaccatcttcaactttctgcagaagtcgtggaaggtagtagataccaggaatcattaggcaatacagtatttgagttggaaaacagagaggcagaggcatacactggtctttcaccaccagttccctcatttaactgtgaagtaagagatgagtttgaagagttagattctgtaccattagtgaaaagttctgctggtgatactgagtttgtccatcagaatagccaggaaattcagaggtcttctcaagatgaaatggttagtacgaaacaacaaaataatactagccaggaaagacagacagaacattcacctgaagatgcagcctgtggtccagggcatatttgtagtgaacgaaataccaatgatagggaaaagaaccatggaagttctcctgaacaggtagtgaggccaaaagttagaaaactgataagttcaagccaggtggaccaagaaacaggttttaataggcatgaggcgaaacaaagaagtgttcaaagatggagagaggctttggaagttgaggaaagtggctcagatgacctcttaataaaatgtgaagaatatgatggagagcatgactgtatgttcttggatccaccatactcaagagttattacacaaagggaaacagaaaataaccaaatgacatcagaaagtggagccacagcgggaaggcaagaagtggataacaccttttggaatggctgtggagattattaccaactctatgacaaagatgaagatagttctgaatgcagtgatggggaatggtctgcttctttgcctcatcgattttctggtacagaaaaagatcaatcctcaagtgatgaaagctgggagactctgccaggaaaagatgagaatgaacctgagctacaaagtgatagcagtggccctgaagaagaaaaccaagaattatctcttcaggaaggggaacagacatccttggaagagggagaaattccttggttacagtacaatgaagtcaatgaaagcagcagtgatgagggaaatgaacctgccaatgaatttgcacagccagctttcatgttggatggtaacaataacctggaggatgactccagtgtgagtgaagacttagatgtggattggagcatatttgatggctttgcagatggactaggagttgctgaagctatttcatatgtggatcctcagttccttacatacatggcactagaagaacgcttagcccaggctatggagactgctctggcccatttagagtctcttgcagtggatgttgaggtggccaatccaccagctagtaaggaaagcattgatggtcttccagagacccttgttcttgaagatcacactgctattggtcaggaacaatgctgtccaatctgttgcagtgagtatattaaggatgatatagcaacagagttgccctgtcaccatttctttcacaaaccttgtgtctcaatttggctacaaaagtcgggaacatgccctgtgtgccgccgtcatttcccacctgcggttattgaagcatctgcagctccttcctctgagcctgatcctgatgccccaccttcgaatgacagtattgcagaagcaccctaaaccttgacagttgaaatgagatcagtgtatcaaagtaaatctgcaaattccttctaaatttcatgtgcaaataattatatataaatatatttaaaaatgctatatatagtatatgccatagtttagaaagaatattaacctttctaaactaaatttaggtttgcagaaagtattaaacatttttaagctgaatgttaagacagtgcatccattttctttagttgaatatgtttgtattaattgtaaagccaagcttatcagttgactctctccagaataaataatcatctgtgtggcatacgttattggctttgtctgtaatactgccactaagtgattataattaagctgtcatgtttgcatcaaatgtaaagactgtgttcacaaccgtagtaaaatttggtttcattggaaatgaaacaaattctaaagtatgctttttcactagtccctttgattttgctatatcataacctcttggttcatatgctgagaaatttttcagaaagtccatttttgtttaaaattagaacttttcagaatgccaaatgaaggctaaaattttggccagaacattacaaaagttttaaatcgtagacgtaactccccctgaaataaagttaggtagtaaaatccttaatgaaaccagtggatgtgcttaacgtaaggttagtaaagcatacaaagaatctagtgtgctcagggcttggtacaatgagctgaattagatggccttatgaaactctttctaacctcttacccaacctgtttctccttggttaaaattatacttgaaggcccagaacactcatggcacatttgtttaatattgcttatagttagtttaaggtaattttgcttctacagtattttggaaggtctgaaaacttgcacagggtcatctttgtaattatataaccccaaactaagatgcacaatgtctccttcaggtgatcacacacagtggacgagtatgtgcaaacatggacataatagttcacttacaaatgtgatttgatgttaacactagagaatgatgactgtagaacatttgagcaagtaaaatagtaaagcacatagtgagtgtatgtccgtctaactggtacattgataatttagtttgggcacataaaaggaatatttatatggcttcccaaatgcagagttacatcttattcgtgtatttctctgagtatttatatcccgtctccttttttcattcttaaaaataaatgaattttcactgttggcacatatgaggcttaaatataaggaacataacacttgcattctaatttttgcatatattgtaaatgtgtctggtatttacagcaaaatactgtgtatccttttatgggtaaaacaaaagtgaacattgcatgcatgtaatgtgatgaatttgtaatttaggagttctttggggcttctgtgacttgggtaatgcttacattcaggccttaatgttgcattagctagcatgttttccctctgatgtatatagtcactgttgtataaactaatctttgcttgttttctactctgtgatctttccatatcatatttcattaatgatcagttagtgtcaaggagtcaaaacagattaaaattaatttcatgtgtatatggtggaaatttgtggctagtgtgatttttgtttgtttccttttaagtactgttgatcagttgtgacacttactggttaaacttacgttgctaaagatttctctataataagccacacattatatttagactatattaagggaccttggttttcttctagatagcagctgtcccaaagaaaatatttcttctttgtctgttaagatttagctattatctgccagttgttaagaggttttggttccaaactcaaccagcaatgttgagagctgaacttaagatagctgttgtactttttgctttccatctgttactgtccttcattcttggctccctactatctataaacagctgctgtgaagaagaaaagttgaataagagttggcttaaattttaaaaaagaaaaagaaaattgaggttttaggattttcatggtaacaagctctggtataagctaaggctggcaagttcagatactaaaatattatttgatcatatcttggatccttttgaaaaagttaagactatatgaaggtaaattagaaataagtatgaatattaataaaatagcatttatcttatttctctattttatgttgtgacttaacctaattttatttttttaacattttcttatttcttataatatgaatgctgatatttaaaggtagatctatgtggtattctttgtgtttcttaattgtttaactcttaagattatttgtgatctggatttatgtatttgttagatacatacgaattgttaaaatggaatgcaagtttttcaaaagcccaggtctaaatgtaatggttggtttattgttctataaccccagcccatcattttctgtgtaaatcataaacaataaacagaatatactcggtggtcaaaaaaaaaaaaaaaaagaaaaaaaaaaaaaaaa

SEQ ID NO: 1703 - DNA, 2023 bp, Homo sapiens
gagaacccagacgggcagagcctgggtaggagagcctggccccgctgtccccactgggtggagacaccatgcacttggtccacttgtgctcttcagccaggacaccagacatggtccaaaccgctgcagggctggctgcagcaactccctgacactcaggaaggcccaggctgggcaggcaatacctgctcccaacagccatctcccaggaaggaccctgttgctagtgtggagcaaagacgagtcaagtttatgggctggaagtcctacccggaggctgctcactgagctgtgatggctacaaggacagatggggggaagggtgcagggtgcccgagacctggcccgctggagcctgtcacctaatggctggctggaagaccactacacaccagccagccctggtccattctctcatttagaggcctccccggtggaggcagggatacacaaaatgctttggggctggatgggcccgcctttcagtctaaacaagagacctcaacacagctgcccagaaaaggcagataccagaaatggataaagctggctgggtggggactgtccgaagggcagccagcagtgagctccggctggttgctaccacacaggacatatgtgttgccagacctgaattttcaatagaaaccaaagatagttttttatataaatgtttaattggcaattaattgaaaaattctgtgtatcagcgaacatgatacagcccacagcctgcgggtctgcgcccctggattaacatgctgccctgccaggaggacacgacctgcagccccatcctaactctggccaccccatcctgcaggcatgccggctgccgctccaggactcccctgtccccaggaccaagatgacgcccaacagcactggcgaggtgcccagccccattcccaagggggctttggggctctccctggccctggcaagcctcatcatcaccgcgaacctgctcctagccctgggcatcgcctgggaccgccgcctgcgcagcccacctgctggctgcttcttcctgagcctactgctggctgggctgctcacgggtctggcattgcccacattgccagggctgtggaaccagagtcgccggggttactggtcctgcctcctcgtctacttggctcccaacttctccttcctctccctgcttgccaacctcttgctggtgcacggggagcgctacatggcagtcctgaggccactccagccccctgggagcattcggctggccctgctcctcacctgggctggtcccctgctctttgccagtctgcccgctctggggtggaaccactggacccctggtgccaactgcagctcccaggctatcttcccagccccctacctgtacctcgaagtctatgggctcctgctgcccgccgtgggtgctgctgccttcctctctgtccgcgtgctggccactgcccaccgccagctgcaggacatctgccggctggagcgggcagtgtgccgcgatgagccctccgccctggcccgggcccttacctggaggcaggcaagggcacaggctggagccatgctgctcttcgggctgtgctgggggccctacgtggccacactgctcctctcagtcctggcctatgagcagcgcccgccactggggcctgggacactgttgtccctcctctccctaggaagtgccagtgcagcggcagtgcccgtagccatggggctgggcgatcagcgctacacagccccctggagggcagccgcccaaaggtgcctgcaggggctgtggggaagagcctcccgggacagtcccggccccagcattgcctaccacccaagcagccaaagcagtgtcgacctggacttgaactaaaggaagggcctctgctgactcctaccagagcatccgtccagctcagccatccagcctgtctctaccgggccccacttctctggatcagagaccctgcctctgtttgaccccgcactgactgaataaagctcctctggccgttaaaaaaaaaaaaaaaaaaaa

SEQ ID NO: 1704 - DNA, 2848 bp, Homo sapiens
gtttcgccggccgcgcggccagatgaggggggcgatggagctggagcctgagctgctgttgcaggaggcccgcgagaacgtggaggcagcgcagagctaccggcgggagctgggtcaccggcttgaggggctgcgtgaggcgcggaagcagatcaaagaaagtgcatcacagacaagggatgttctcaaacagcattttaatgatttaaagggaacccttggaaagctcctggatgagcgattggtgacccttttgcaagaggtggacaccattgaacaggagaccattaaaccactagatgactgccagaagctcatagaacacggagtcaacactgcagaggacttagtccgagaaggtgaaatcgccatgcttggtggtgtgggagaagagaatgagaaactgtggagctttaccaaaaaggcttcgcacattcagttggacagcttaccagaagtacctttactggttgatgtgccttgtttatctgctcagttggatgactcaattcttaacatagtgaaagaccacatttttaagcatggaacagtagcatctcgcccaccagtacagatagaagaactaatagagaaacctggaggcatcattgtacgatggtgtaaggtggatgatgactttacagcccaagattacaggctccagtttcgtaaatgtacttcaaatcattttgaggatgtatatgtaggttctgaaactgaattcatagtattgcacatagaccccaacgttgattaccagttcagagtctgcgcccgaggagatggccgacaggagtggagtccttggagtgtcccccagataggtcattccacattggtgcctcatgagtggacagctggttttgaggggtacagtctgagcagtcgaagaaatatagcacttcggaacgattctgaatcatcgggtgttctctactccagagctccgacttatttctgtgggcagacattaacattcagagttgaaactgtgggacagccagacagaagagacagcataggagtgtgtgcagaaaaacaggatggatatgactctctgcagcgggatcaagctgtgtgcattagtacaaatggtgcagtttttgtcaatggaaaagaaatgacaaatcagttacccgcagttacttctgggtccactgtcacgtttgacattgaagccgtgactctaggaaccaccagtaataatgaaggtggacacttcaagcttcgagtaactataagttcaaataatagagaagtggtttttgactggttacttgatcagtcttgtggttctctttactttggatgctcatttttctatcctggatggaaagtgttagtgttttagatgtttgggtgcttggctttggttttcagggtctaacgtagctgtcctcagcccagcgtagttgtaattgctttaaaaacaaagttgaattcatctctaacttaggccattggaaagtgtttactggattcattttgtaatattttagcaaaaagagacttgaatgttgtggacaaaatcatacaattcagtcaattttatttttagcatactgttaaatatcacatcacaataaaaatcaaattggcattaaaagtatagaagatataggaagttctatacccttccactgtacttctcaaagttggttattagaccaggaaaacttaatgtaatattatttttaaaatcatcttaaaggatccaagtccatgtaactctttagaacaagaggaataggtcagatagaagaagctgtgtaatgtattaatacatccgttcatgtgctgtccacatgaatgtgttgactgtgctctccatgttcaggtatttgtaagcagtgttgacttttatcccctcttcagtaatctttaagtccccaaaacattataattttttctttttttgttgagacggagtctcactcttgtcactcaggctggagtgcagtggtgtgatctcagttcactgcaacctctgcctcccacgttcaagcgatcctcctgcctcagcctcctgagtagctgggattacaggtgtcggccaccacacctggctaatttttgtatttttagtagagacagggtttcaccatgttggccaggctggtctttaactcctgacctcaggtgttccacccacctcagccttccaaagtgctaggattacaggcgtgagccactgcagtgggccaatttttgtatttttttaaatgcttgaccaagtgtctaaaataggcaagtagtaccttttgttctttcattgcaatttgatacagtataggctacagtatttttacagggtaaaactagttatggcagtagtatgcacagcagtgttagccatttcgtatgtatgtaatatgcacgtgtgtatccaatctgcctgtgacatgcattttactctttgcagagaatgagctgcagtccagtttaatgtcagtttaataagtggtctctttttagcagagcaaaaaaatatagcgtaaatacttattttttttaaaaacttacttaaatttgtgtgtaaaatatttatttgaaggactttaatatgtaaaaataattgtcttctatgccaccctacagattctattttaatgtgaattatttttttcatttttaccagtagtaaaaaagtagaaaagcaagtatgatatttttgtaagataatttatttggggattcatgttcccctgttagacaatcatgaccttttctacttgtctttttatatataagtagtagatttccacttgtttagggattaagaagatgttctagaatgtagataccttgtccagccataggaatcaaaataaaaaactaaaaaagttca

SEQ ID NO: 1705 - DNA, 1642 bp, Homo sapiens
tttcagcctcacctgcagctgcgcctccttgcacctgcgcctgtgctttttctcccagcactgcggacgcgactcgagggtgacgctcgctccgctcgtcccgctcgtcatggcctacccgggatacggaggagggtttggaaattttagcattcaggtgccaggaatgcagatgggacagccagtgccagaaacaggcccagctatactcctcgatggatactctgggccagcatattcagacacttattcctcagctggtgactccgtgtatacttacttcagtgctgttgctggacaggatggtgaagtggatgctgaagaacttcagagatgtttgacacagtctggaattaatggaacttactctcccttcagtttggaaacctgcagaattatgattgccatgttggatagagatcacacaggaaaaatgggatttaatgcattcaaagagctatgggcagctcttaatgcctggaaggaaaacttcatgactgttgatcaagatggaagtggcacagtagaacatcatgagttgcgtcaagccattggtcttatgggttataggttgagtcctcaaacattaactactattgttaaacgttatagcaagaatggcagaattttctttgatgattatgttgcttgctgtgtgaagcttcgagcattgacagatttctttaggaaaagagaccacttgcaacaagggtctgcgaatttcatatatgacgattttttgcagggcactatggcaatttgaatgcttagaattttaaacctgaagagacactgtgaattcttttgtttggaagaagtgaactggactactttaaaacttttaagggttttctatgttcttcctacctgttaaacctcttccctttctgtgtgtttttattttagcagatagttcaaagcaataaaagatttcttttttaatttgaggtattactgcttttggaaaagttattttataaatatgtgcatattgtcataaaatattgtatgattaattgatttaaataatgcttagccttaattttagataatgtaaatttagaggaatgtactttacaagatagattgtataagaagccaaataatgaaagcctagggaaaaaactaatttatacttatctgaaggttacaaattagacttttaaattttctttgtagttggtggtgtttgagggttggctagaaatgaaagcctggattttgtgccatgtttgtaatatagtttgttccttgatcaaataatcagagaaaagaaacttaaagatctttgtctgtgaagaagaaaattatctccctagttcaatctgtagtgaaataagactacagaaggcattgttttttccttttttattttttgtattatatatttttcttaaatatgttttattgtcttctctaagcaaaaagttcttaataaacatagtatttctctctgcgtcctatttcattagtgaagacatagttcacctaaaatggcatcctgctctgaatctagactttttagaaatggcatatgtttttgatgatatgtcaacattcaaaattgtcctaattaaattgttgtttaaatgtaatgtcaactctttataaacttaaaaataaacaagtaattaaccactca

SEQ ID NO: 1706 - DNA, 1932 bp, Homo sapiens
gacccgctcgctcgctcgccagccgtccccgcgccccgcgtccccgcgccagccgcctcctggcctcgggcgccgcgcatccaggaaggaagcagccaccctcgccatggcctccccgcccgcctgcccctcggaggaggacgagagcctgaagggctgtgagctgtacgtgcagctgcacgggatccagcaggtcctcaaagactgtatcgtccacctctgcatctccaagcccgaacgccccatgaagttcctccgggagcacttcgagaagctggagaaggaagaaaacaggcagattttggcgcggcaaaagtcaaactcacagtcggactcccatgatgaggaggtgtcgcccacccccccgaaccctgtggtgaaggcccgccgccggcgaggaggcgtgagtgccgaggtgtacaccgaggaggacgccgtgtcctacgtcaggaaggtgattcccaaggactacaaaaccatgactgcgctggccaaggccatctccaagaacgtgctcttcgctcacctggatgacaacgagaggagtgacatattcgatgccatgttccctgtcactcacatcgctggggagactgttatacagcaagggaatgaaggagacaacttctatgtcgttgatcaaggggaagtggatgtgtacgtgaacggagagtgggtgaccaacatcagcgagggaggcagcttcggggagctggcgctcatctacggcacccccagggctgcgaccgtgaaagccaagacggacctcaagctctgggggatcgaccgggacagctaccggcgcatccttatgggcagcacgctgaggaaacgcaagatgtacgaggagttcctcagcaaggtctccatcctagagtccctggagaagtgggagcgtctgaccgtggcggatgcgctggagcccgtccagtttgaagatggagagaaaattgtggtccagggagagcctggggacgacttttacatcatcacggagggcaccgcgtccgtgctgcagcgccggtcccccaatgaggagtacgtggaggtggggcgcctgggaccctctgactacttcggggagattgcactgctgctgaaccggccccgggcggccactgtcgtggcccgggggcccctcaagtgtgtgaagctggaccggccccgcttcgagcgtgtgctggggccctgctctgagatcctcaagaggaacattcagcgttacaacagcttcatctccctcaccgtctgagcacagctcccgccctgcagccccagctccccagtgtggtggccgtgccctgctcgtctgtgtcgggggcccgggagccgctgtgtgaggtgtgggccgggtggggctgggtcccggcagcgtgaggactgccccttccccggactcactttttggaataaatgatcaccttgtgcatttccaaatcaaaggacaagcggacaaaatgcatcccaagatcaaggaagggacaggccagcttcctccccacacgcctccccggctgcctctgtgggcttctcctggggggcccaccccacccctgccagtctcctggagatgcttgaggatcggtcctccccagaaccaggccaggacgttgcccctggggcctggtgaccctgtgaggtcaggtcccccagattgaggtctgagtgtgggcaagtgtgtcaaaaggggctgccccccaggggagatgaggctgagagcagggagttgaggccgaagaagtcaaggcccctcccgcaaatgtgtacccctgcccgcgccactgcaccccgccgcacccccacctcccccgggggccctgctgcggatgccggagtgggagagtctctgagctgtgagattgatcttgcccctaattggagaggaagccgggcgccaagacacacggggctcctgccttgggagccagggcc

SEQ ID NO: 1707 - DNA, 1993 bp, Homo sapiens
aaccaatcctcacaacaggactgggagacaggtgttacctttcccactttacagagaatgaaacagagtggcaaagcctccgaaggaccctacacttcggacatcgcaaagcaggatctgagtcccggctcctctgtccaaacctacttgctaggctttctttcccatgtctactctatagctggaaaggtcgtggaggacacattttaggccaaccctctcggtttacaatccagagaggggagaccctcagaagccaagcgacatgtccacggctacgcggcgagtgtgtggcaacgtggaaggggagcccgagacgccctggtctctcccttctctcgcaggttcctttctccccgaacgcagcccgcaggggacgctggaggaggagctgagctggagttgccggggccccgggaccgggcgttccgggggcggtccccagcagccgcgcattccagagccagcagcgcgtcctggccgctcctgcgctctcccgcctcccggggctcggaggagccggggcacgttccaggagctgcctagggctgaggttccaggcctgggggtcgcttccagctgccagatcccgtgcagtcctggggaccctgagaagcaccgagccatccctgacccaggaactttccgcagactcgccgccatctgggagtgaagcaacatggatgcagtcagccaagtccccatggaagtcgtgcttcccaagcacatcctggatatctgggttattgtcctcatcatcctggccaccattgtcatcatgacctcgttgttgctgtgcccagccactgcagtaatcatctatcgcatgcggactcatccgatccttagtggggctgtttgagagcctcccaagagggccgggtgagggatgaggacaggcatcctatccccagcctcttcctgtcttcagaaaagcagcaggagggactttggggcatggacctgagttctggttttgattctgccacgagccagctgtgtgaatttggtcaagggacctaactctctgagttccaggttccttatctttcaaatggggatggtgatccctgccctttctacctcatagggatgtgagaaccacctgacttagtggatgtgaaagctgtttgtgatcagtaaagctaccacagatataagggtgttatgctgaatcctgagaagctttcaagaaccagagaacctgattgctgatgatggccttaaaggtggtgagggagatactgggggcagagcagactttgccagtgcccctcaggtcaaaccaagccaagagcaccctgtccccattccaaggggccagcagcactttggcccaaagtattttctttaaggtgccattccttcatgttttctcagtttggagggtgatgggtagagctttccagaaccttctccattccagaatctctgcccctgtgtaatctgaaggaaggctgtgccatctttgggcactgccaagggagttggggtgatgggcttctttctgcactggagtctcacatctgttagctttgacactcaagcaatgttggaaaatgcagggtgactgagttccctgcccagctttcgggatctctggcccccatccccttgtgtgtgtccctctgcccagctcctgctgtaattagctccacgtgtacccccttcactccctcccaccagctctgcagccagcctatggcaattatattttaagaggtgttcccaggacttttgggacctactaaaacaatgatggttattttagatgtgatgatttatatttatgtagagatatttctggaccactcaagctcttcgataccaaaatcaggagcatcttgggatttattaaattatgtaagaagatagcacagatatcgggatattattgtgtgaaaatgctgcttttactttgatgtgatctcattgatgtacacaaccaagttccaataaagtgctagaatgtgcaaaaaaaaaaaaaaaaaaa

SEQ ID NO: 1708 - DNA, 1326 bp, Homo sapiens; identical to SEQ ID NO: 52

SEQ ID NO: 1709 - DNA, 1378 bp, Homo sapiens
agctgccttgcacagcctcgcaatgagctgccacaactgctccgacccccaggtcctttgcagctccgggcagctgttcctgcagcccctctgggaccacctgaggagctgggaggccctcctacagtcgcccttcttcccggtcatcttctccatcaccacatacgtgggcttttgcctgcccttcgtggtcctggatatcctgtgctcctgggtgcccgccctgcggcgctacaagatccaccctgacttctcgccatccgcgcagcagctgctaccttgcctggggcagaccctctaccagcatgtgatgtttgtgttccccgtgacgctgctgcattgggcccgcagcccggccctcctgccccacgaagctcccgagctgctcctgctgctgcaccacatcctgttctgcctgctactcttcgacatggagttcttcgtgtggcacctgctgcaccacaaggtgccctggctgtaccgcaccttccacaaggtgcaccaccagaactcgtcctcgttcgcgctggcaacgcagtatatgagcgtctgggaactgttttctttgggcttcttcgacatgatgaacgtcacactgctcgggtgccacccgctcaccaccctgaccttccacgtggtcaacatctggctttccgtggaggaccactccggctacaacttcccttggtccactcacagactggtgcccttcgggtggtacgggggtgtggtgcaccacgacctgcatcactctcactttaactgcaacttcgctccgtactttacacactgggacaaaatactgggaacgctgcggactgcatctgtcccagcgcggtgatgtggctgcggtgggtgcccctaagactcgggactgctgtgcctttcacacttgaatgaagagaaacacctgagctatatatttttttaaagcaactaacttattgctttatgtttatctatgaaaaccatagataaaatctgatgcatttttgtaatctgacaaagtaatttacatactgtttgtgtatcaatacaattttgtgttcttggtattcttagtctagctcacctcaatagccttgaatcctgcatatgaattagacattcatcactggcatatttagaatatctctaaaaggacttgtttgtagaataaggaattttctatgtttcaaagtgttctaaaacctggctaaaagaatgtatttttgtggatggtgttgacttctgactctaaaagcaatcaaacatgtttctgctggacagtgaccaagaattatagtaccttcttatatttttttatagaactgtatatttattttgaaagaaatgttattcgtgctttaaaaaggaaaaaaaaccatgaatcaaataa

SEQ ID NO: 1710 - DNA, 396 bp, Homo sapiens; identical to SEQ ID NO: 58

SEQ ID NO: 1711 - DNA, 830 bp, Homo sapiens
cccccccgagcgccgctccggctgcaccgcgctcgctccgagtttcaggctcgtgctaagctagcgccgtcgtcgtctcccttcagtcgccatcatgattatctaccgggacctcatcagccacgatgagatgttctccgacatctacaagatccgggagatcgcggacgggttgtgcctggaggtggaggggaagatggtcagtaggacagaaggtaacattgatgactcgctcattggtggaaatgcctccgctgaaggccccgagggcgaaggtaccgaaagcacagtaatcactggtgtcgatattgtcatgaaccatcacctgcaggaaacaagtttcacaaaagaagcctacaagaagtacatcaaagattacatgaaatcaatcaaagggaaacttgaagaacagagaccagaaagagtaaaaccttttatgacaggggctgcagaacaaatcaagcacatccttgctaatttcaaaaactaccagttctttattggtgaaaacatgaatccagatggcatggttgctctattggactaccgtgaggatggtgtgaccccatatatgattttctttaaggatggtttagaaatggaaaaatgttaacaaatgtggcaattattttggatctatcacctgtcatcataactggcttctgcttgtcatccacacaacaccaggacttaagacaaatgggactgatgtcatcttgagctcttcatttattttgactgtgatttatttggagtggaggcattgtttttaagaaaaacatgtcatgtaggttgtctaaaaataaaatgcatttaaactcatttgagag

SEQ ID NO: 1712 - DNA, 3916 bp, Homo sapiens
gagcaggaagtgtttgaggaagtcgcgccgcgctgcccgcgttaagattcccgcattttaatgttttcaggggggtgtcatagccccgggtttggccgccccagccccgccttccccgccccggggagcccgccccctgccccgcgtccctgccgacagagttagcacgacatcagtatgagctggtcaccttccctgacaacgcagacatgtggggcctgggaaatgaaagagcgccttgggacagggggatttggaaatgtcatccgatggcacaatcaggaaacaggtgagcagattgccatcaagcagtgccggcaggagctcagcccccggaaccgagagcggtggtgcctggagatccagatcatgagaaggctgacccaccccaatgtggtggctgcccgagatgtccctgaggggatgcagaacttggcgcccaatgacctgcccctgctggccatggagtactgccaaggaggagatctccggaagtacctgaaccagtttgagaactgctgtggtctgcgggaaggtgccatcctcaccttgctgagtgacattgcctctgcgcttagataccttcatgaaaacagaatcatccatcgggatctaaagccagaaaacatcgtcctgcagcaaggagaacagaggttaatacacaaaattattgacctaggatatgccaaggagctggatcagggcagtctttgcacatcattcgtggggaccctgcagtacctggccccagagctactggagcagcagaagtacacagtgaccgtcgactactggagcttcggcaccctggcctttgagtgcatcacgggcttccggcccttcctccccaactggcagcccgtgcagtggcattcaaaagtgcggcagaagagtgaggtggacattgttgttagcgaagacttgaatggaacggtgaagttttcaagctctttaccctaccccaataatcttaacagtgtcctggctgagcgactggagaagtggctgcaactgatgctgatgtggcacccccgacagaggggcacggatcccacgtatgggcccaatggctgcttcaaggccctggatgacatcttaaacttaaagctggttcatatcttgaacatggtcacgggcaccatccacacctaccctgtgacagaggatgagagtctgcagagcttgaaggccagaatccaacaggacacgggcatcccagaggaggaccaggagctgctgcaggaagcgggcctggcgttgatccccgataagcctgccactcagtgtatttcagacggcaagttaaatgagggccacacattggacatggatcttgtttttctctttgacaacagtaaaatcacctatgagactcagatctccccacggccccaacctgaaagtgtcagctgtatccttcaagagcccaagaggaatctcgccttcttccagctgaggaaggtgtggggccaggtctggcacagcatccagaccctgaaggaagattgcaaccggctgcagcagggacagcgagccgccatgatgaatctcctccgaaacaacagctgcctctccaaaatgaagaattccatggcttccatgtctcagcagctcaaggccaagttggatttcttcaaaaccagcatccagattgacctggagaagtacagcgagcaaaccgagtttgggatcacatcagataaactgctgctggcctggagggaaatggagcaggctgtggagctctgtgggcgggagaacgaagtgaaactcctggtagaacggatgatggctctgcagaccgacattgtggacttacagaggagccccatgggccggaagcaggggggaacgctggacgacctagaggagcaagcaagggagctgtacaggagactaagggaaaaacctcgagaccagcgaactgagggtgacagtcaggaaatggtacggctgctgcttcaggcaattcagagcttcgagaagaaagtgcgagtgatctatacgcagctcagtaaaactgtggtttgcaagcagaaggcgctggaactgttgcccaaggtggaagaggtggtgagcttaatgaatgaggatgagaagactgttgtccggctgcaggagaagcggcagaaggagctctggaatctcctgaagattgcttgtagcaaggtccgtggtcctgtcagtggaagcccggatagcatgaatgcctctcgacttagccagcctgggcagctgatgtctcagccctccacggcctccaacagcttacctgagccagccaagaagagtgaagaactggtggctgaagcacataacctctgcaccctgctagaaaatgccatacaggacactgtgagggaacaagaccagagtttcacggccctagactggagctggttacagacggaagaagaagagcacagctgcctggagcaggcctcatgatgtggggggactcgaccccctgacatggggcagcccatagcaggccttgtgcagtggggggactcgaccccctgacatggggctgcctggagcaggccgcgtgacgtggggctgcctggccgcggctctcacatggtggttcctgctgcactgatggcccaggggtctctggtatccagatggagctctcgcttcctcagcagctgtgactttcacccaggacccaggacgcagccctccgtgggcactgccggcgccttgtctgcacactggaggtcctccattacagaggcccagcgcacatcgctggccccacaaacgttcaggggtacagccatggcagctccttcctctgccgtgagaaaagtgcttggagtacggtttgccacacacgtgactggacagtgtccaattcaaatctttcagggcagagtccgagcagcgcttggtgacagcctgtcctctcctgctctccaaaggccctgctccctgtcctctctcactttacagcttgtgtttcttctggattcagcttctcctaaacagacagtttaattatagttgcggcctggccccatcctcacttcctctttttatttcactgctgctaaaattgtgtttttacctactactttggtggttgtcctcttttcggcaaagttggagcgagtgccaagctctccatctgtggtcctttctgccaagagcgactcatagtaaccaggatgggagagcagctgccttattctgaatcccaaaaattacttgggggtgattgtcacagaggagggacagaaagggtatctgctgaccaccagcctgcctacccatgcccatgtctccattcctgctcaagcgtgtgtgctgggccggggagtccctgtctctcacagcatctagcagtattattaaatggattcattttaaaaatagctcctatattttgtaacatgtctcaaacactcatactgggttccacaatccactgttagaatacctatggttagggcttctgaactaaaataatggaaaattttaacaatttgtatagtgcctggatcattactagtgccataaccctgcttcttcaacatttcacagaacttctcttttatataaaggcaagagcacaaaatgagttcagatgatcacaaacaggtgagttttgttggagaagaaagttggagtaggagactttcacaagtggtttccatggagatagaatgaagcattctgtggtcaagtaagtttagggagctattcatgtttcacttgctttgtggagattcacactatgcactgggaaagtatctgaaaagtcttataataaagaaacaggcttaactttgtgtaagaacactgtttatcaatgtcatttggctatagaaacattttctcctgctgattgtgtgtgtgaaacatgtattaacattccaatgaactagcatttaataaagcacaattttgg

SEQ ID NO: 1713 - DNA, 1747 bp, Homo sapiens
atggggaggcgctgctgccggcggcgcgtgctggcggccgcctgtctgggcgccgcgctcctgctcctatgcgccgcgccccgctccctgcgcccggcatttggaaacagagccctgggctccagctggcttggtggggagaagagaagccccctgcagaagctctatgacctggatcaggacccgcgctcgaccctggcgaaggtgcaccgtcagcggcgcgacctgctgaacagcgcctgtagccgccactcacgccggcagcgcctgctacagccggaggacctgcggcacgtgctggtggacgacgcgcatggcctgctctactgctacgtgcccaaggtggcctgcaccaactggaagcgcgtgctgctggcgctgagcggccaagcccgcggcgacccgcgcgccatctccgcgcaagaggcgcacgcgcctggccgcctgccctcactggccgacttcagccccgccgagatcaaccggcgcctgcgcgcctacttggccttcctgttcgtgcgggagcccttcgagcgcctggcatcggcttaccgcaacaagctcgcgcgcccctacagcgccgccttccagaggcgctacggtgcacgcatcgttcagcgcctgcggccgcgcgcgctccccgacgcccgggcccgcggccacgacgtgcgcttcgcggagttcctggcctacctgctggacccgcgcacgcggcgtgaggagcccttcaacgagcactgggagcgcgcgcacgcgctctgccacccgtgtcgcctccgctacgacgtcgtgggcaagttcgagacgctggcggaggacgcggccttcgtgctgggcctggcgggcgcatccgacctgagcttccctgggccgccgcggccccggggagccgccgcctcccgcgacctggcagcgcgcctcttccgggacatcagccccttctaccagcggcgcctcttcgacctctacaagatggacttcctgcttttcaactactccgccccctcctacctgcggctgctctagcggtcctggaggtcctgtggccacgcggggcaagtgcctttccgacaagacccccggggaatgcaggtgctgccggccccaggacccctcttcaagagccactgcgtgcactcacctggccgccgggccagcgggcgcagggcacacctggccaggcttgggggcagcccatctcaggtggccctgcacgcgtgtgcctgcctcggcctgtcgcctgaggcctgcttcctccacttgctccagctgacaggcacctctccaggccccgtagatgggcaaggacttgataaccagggttttaggcttttaaaggccattttgggggtcagccctgcccctgaacctgttcatggtgcatcagaacataatgctgacaccggtgtcagtgtggcccgagcctgtgtcctccccacctcgcccaccctggcaaggacagctgcggccaaggacgaaagccctcccttggctggcctcacgatggggccgtcccgggagccaggtgggagctgccttccactgccatcgggtctcctctcctctcccacgcggctggccctacccaggcgccaccttcggtctcagtctggcaagacgctgggtcttcaggctccatgccaacagagcccctggtgcaatgcggtcacaggttttatgggactttggtgagctgggcggtcatggttttgaaataaatgtattttgttactttctgaaaaaaaaa

SEQ ID NO: 1714 - DNA, 1503 bp, Homo sapiens
cacgcagggtctactgagcgccatcccttgtgctggactctggctacttaaataggaatcaagccaggtccctaccattgctcagcccgcagccgagtgggaaagaagctcgcaaaagcagcaaacaggcagtaatcgagggaagatggaagagttgagtcaggccctggctagtagcttttctgtgtctcaagatctgaacagcacagctgccccacacccccgcctatcccagtacaagtccaagtacagttccttggagcagagtgagcgccgccggaggttactggaactgcagaaatccaagcggctggattatgtgaaccatgccagaagactggctgaagatgactggacagggatggagagtgaggaagaaaataagaaagatgatgaagaaatggacattgacactgtcaagaagttaccaaaacactatgctaatcaattgatgctttctgagtggttaattgacgttccttcagatttggggcaggaatggattgtggtcgtgtgccctgttggaaaaagagcccttatcgtggcctccaggggttctaccagtgcctacaccaagagtggctactgtgtcaacaggttttcttcacttctgccaggaggcaacaggcgaaactcaacagcaaaagactacaccattctagattgcatttacaatgaggtaaaccagacctactacgttctggatgtgatgtgctggcggggacaccctttttatgattgccagactgatttccgattctactggatgcattcaaagttaccagaagaagaaggactgggagagaaaaccaagcttaatccttttaaatttgtggggctaaagaacttcccttgcactcccgaaagcctgtgtgatgtgctatctatggatttcccttttgaggtagatggacttctcttctaccacaaacagacccactacagccccggaagcactcccttggtgggctggctgcgcccctacatggtgtcagatgtccttggtgtagctgtgccggctggcccgctgaccaccaagccagactatgctgggcaccagctccagcagattatggagcacaagaagagccagaaggaaggcatgaaggagaaactcacacacaaggcctctgagaatgggcactatgaattggagcacctgtctactcccaagttgaagggttcttcccatagcccagaccaccctggatgcctcatggagaattaaagagagaagcctccttaaggagccacaggatggtacctggccccaaaaggaatcctggagaggaggacagtgacaacaggtgacttcattctttagagtgaactttccaaacccagtccagctggaaacagcttatctataatctgaaatgctggctcaaacagttatggggaggttcccagattgcgtagcattcagattgatttgagcagctcctactgtgataagtgtatcccagatccacaatgtaaatatatgtgatttgtaagaaagaa

SEQ ID NO: 1715 - DNA, 5827 bp, Homo sapiens
ggcgcgggtgcgggcgccccagccggccgcgatcgcgggatttctgcgccaggagatgaggggcggtagagccctggaatggagatgtccttgacgcctgggcagaggctgcagctgcaggaccctgtggccactggagataagtaatggtgccatttgaacacctactggaaacggggcaggaacagtgagtgaccccaggcgagcacaggcaggtgccaggagccaggatgcaaggatgacgcctccggaggccctggcctcactcccacctgggcgctaggagccatcccggggctccagccaggagccctgctgcccaggggcatggccaaacctttcttccgactccagaagtttctccgccgaacacagttcctgctgttcttcctcacggctgcctacctgatgaccggcagcctgctgctgctgcagcgggtccgcgtggctctcccacagggcccccgggcacccggccccctgcagaccttgccagtggccgccgtggcgctgggcgtgggcttgctggacagcagagccctgcacgaccctcgagtcagcccagagctgctgctgggtgtggacatgctgcagagccccctgacccggccccggcccggcccccgctggctccggagccgcaactcggagctgcgtcagttgcgtcgccgctggttccaccacttcatgagtgactcccagggaccgcccgccctgggccccgaggctgccaggcccgccatccacagccgaggcacctacattggatgcttcagtgacgatggccacgagaggactctgaaaggagctgtgttttatgacttgagaaagatgactgtctcccactgccaggatgcgtgtgctgagcggtcctatgtctacgccggcttggaggccggggcggagtgttactgcgggaaccggctgccagcggtgagcgtggggctggaagagtgtaaccatgagtgcaaaggcgagaagggctctgtgtgcggggctgtggaccggctctccgtgtaccgtgtggacgagctgcagccgggctccaggaagcggcggaccgccacctaccgcggatgcttccgactgccagagaacatcacacatgccttccccagctccctgatacaggccaatgtgaccgtggggacttgctcgggcttttgttcccagaaagagttccccttggccattctcaggggctgggaatgctactgtgcttaccctaccccccggttcaacctgcgggatgccatggacagctcagtatgtggccaggaccctgaggcacagaggctggcagaatactgtgaggtctaccagacacctgtgcaagacactcgttgtacagacaggaggttcctgcctaacaaatccaaagtgtttgtggctttgtcaagcttcccaggagccgggaacacatgggcacggcacctcattgagcatgccactggcttctatacagggagctactactttgatggaaccctctacaacaaagggttcaagggcgaaaaggaccactggcggagccgacgcaccatctgtgtcaaaacccacgagagtggcaggagggagattgagatgtttgattcagccatcctgctaatccggaacccatacaggtccctggtggcagaattcaacagaaaatgtgccgggcacctgggatatgcagctgaccgcaactggaagagcaaagagtggccggactttgtcaacagctacgcctcgtggtggtcctcgcacgtcctggactggctcaagtacgggaagcggctgctggtggtgcactacgaggagctgcggcgcagcctggtgcccacgttacgggagatggtggccttcctcaacgtgtctgtgagcgaggagcggctgctctgcgtggagaacaacaaggagggcagcttccggcggcgcggccggcgctcccacgaccctgagcccttcaccccggagatgaaagacttgatcaatggctacatccggacggtggaccaagccctgcgtgaccacaactggacggggctgcccagggagtatgtgcccagatgataggcctggcccacgccgccgcccccgctgagtgacgcaatcgcaccacggggctgcgctccccactctgatgctcaggcccgtggcctcactgggacgaacggtgggtggggggctcaccctggtgctgcctcccgcacaaggagacctggacacaacagacacacatcacaaggcgaacacaaatggacacacatacctggccacgaacccacacctcctcagacactcagacaccactccaggctcatagccccgtcttgatgcagagaagccacccacgtggggtgtgccaggcacccccagatacaaatgcagccacgcacagacgtaacacacaggtgccaggccgtgtgctcctggaggctggctggctgtctctctcacacagatacacgtgcgctccctgggatccgggaggccctgggcttcctgtgtgtagccctggcatagacttgctcgtcagggtgttcgactctgggatgctgggccgggcagacatttatgctctgagcagcaaggaccattgggatggaggtgggcacaaagactgctgcttccagggtgtgcggccctggccgtgtgtctgacatcccataaatgtgtgtgtggtgtgactacgggcaccacaaactccgcagccttgcctctcttttctctgtggctgggctggctgcaccatgggcagggttgaggactgccccccaccccgcccaagccaatgcagacactgacctcaagaccagccacaccaagtctgtgcactgcccaccacccccttcaacccctcctacaccatgctccggggcctggggcctccttgcctggcttcttcctccagctatcctcagggaagctggagattcaagtcatgccccagaagcaaggtgtaagcatgggggcgtggggaagagggcaggagctgaagttccaggggagcccaggacccctggggacctgtacactagcaggatgggtcttgggagttggcatggggagattgtaagggctgtatctccgcgattactggtactggtgctccacccataggggccctgttctctctggggtcccacactggggtcatgagagctagttagtactcagcctgacccctaggtctggtcctgccagcctgggatgggggtcaatgtatgctacacatcttgggctcacaagtgaggctgtggaggccaggaggttcaagtatggagggtaggagtgcaacccaggagcaacgctcaaggtggccgagatgcagggaggattgtggcgatccggttgcacactggcctctgtggaggtcagggaggtgggaaggtgggtgggcctgaactcaggcagcccttcagtggcttcttcaggcctaggataaccctggccaggccccatggtcctgctctgggtcagctgtcagggagacctcccttcagcctgagccaagctgcattgggaggagaaggcagggtgagggatctgggagagcaggacgttgagatatcctgaccctctgcttcctagcctgatgatggggaacccagagccacccgctatgagcacaggccgggggtggaaggcccagtagagctgcccttccccagatggaagcttcctccaaccttcagtttggccagtgggtgggtttgggcatctgtgcccctggtggcctccaaatccttcctgggattcccccaaacccacactgatgcgaagctgttcttgaccctcccatagcatcaactcagttcagctcaaagctagaaacaccaaggtctttgaaaatgtttattggctcaggatagcttcggcatccaatctgcgaaggcccctgatggagctatttcttcctagtatcaggagcaattgagacccctcaggagtttccacactgctgtggacgggatagccagggcagacctgcatcccagagcaagcctagatccttgaaagcaatgtcaggcgtggcagtggggaagccatggaggctgggaagggcaaagtgtggagagaggagtgaccgggactggagccagggtctggggagagcaacagcaccaggcttttcctggtagttggattggtacattcactgctgccaggtacccagagatgtcatctctctccaggtagagcatcaccagctcctgtggccttgtagatgactctgtacctcagtgaagagtgcaggcaagtagagtgatggggtcagtgtccatccagtttacgctgagtcagtccatacagcaagacacctggcacttggcaggtactcctggatgttgatgagcaaggaagagcaacggccctgtcagctggcagtggtcctcacagccttcatcccaggtctgcctacgtgggagatctcatcagaaacaggaacggggatctgtctgtgcttgcaggaaagtccatttgtttttctccaagttaggtctcatctacagctcttagcttctcagtaaagaggatactctcccaaccagccaaggaataaaagctgatctgtatgtagggcagaagtgtggcaaatgcatcaggaaccggttagaacagaacagagaaaccctgactgtctacagattccaactttaatagcaagcctgtggagttacacaaacctgtgttaaaacatgtaatttttatggatttcatctcccgttgtggatcaatttggaaaaaccaaaatatgtaattttaaaaaactaaaacacatcctggtagtcccagtgatgtgtaaatgagagagaagaatagacaggcttccaaaccctgggaagaaagctgcttaattatgtgaacatcttataatgaagtctcttgcagctaaaattagattttgagtgcatgaatctgtgataatgtttgcatatcagaatgcattctccccttaaaagtagcagtagccacttggttcttagggggccccaagaggagaggagaagtgctgaggttgatgttacgactgcaagaattcttgggacacaggtttgttttctgctgacttgctcggaaacccattggaggtatctgaaatgtgatgactccaaaggggttcatttcactatagggagaaattgattcgtctgacttcctatttatcaccactcaatattgggtgagttggtctgaacaaggtggggataaagtagagtggaaataatgtagagtcgtcagactgaaaggccaggttgtagtcccagctcttatctgccatcttggacaaagcttttcccatctccagtctcagtttcccatccataaaatgggggaagtggtaggtcttgctgattgcatccacattcattcctccatttcctttcccagcaaccccccatttctgtttgggaattcatatgatctgccagagcctctccaggggtggaatacatgtcctggactaagccaatgacaccttccatctttccagctatggtgactgggttaggtatgatcttgtgagttaagacaatgaagccagagggaatttcaagacttatgggaatgctgggtagaagctgttttaattcccctgttgaatgtgaaaaaggtagtagtattcctgggtctttatgatgaccaccttgggccttgggatcatgaccaggaatcacgtgaagctgacaccactgaagggagagttgagaggcagaaagagatcaagtccttggtgaaattgtttaagtacaggatcaagccttgcttgagattggccttacctctggactttttttgttatatgagctaataaattctgtttattgtttaaaaaaaa

SEQ ID NO: 1716 - DNA, 748 bp, Homo sapiens
gcagataatgggaggagccgggcccgagcgagctctttcctttcgctgctgcggccgcagccatgagtatgctcaggcttcagaagaggctcgcctctagtgtcctccgctgtggcaagaagaaggtctggttagaccccaatgagaccaatgaaatcgccaatgccaactcccgtcagcagatccggaagctcatcaaagatgggctgatcatccgcaagcctgtgacggtccattcccgggctcgatgccggaaaaacaccttggcccgccggaagggcaggcacatgggcataggtaagcggaagggtacagccaatgcccgaatgccagagaaggtcacatggatgaggagaatgaggattttgcgccggctgctcagaagataccgtgaatctaagaagatcgatcgccacatgtatcacagcctgtacctgaaggtgaaggggaatgtgttcaaaaacaagcggattctcatggaacacatccacaagctgaaggcagacaaggcccgcaagaagctcctggctgaccaggctgaggcccgcaggtctaagaccaaggaagcacgcaagcgccgtgaagagcgcctccaggccaagaaggaggagatcatcaagactttatccaaggaggaagagaccaagaaataaaacctcccactttgtctgtacatactggcctctgtgattacatagatcagccattaaaataaaacaagccttaatctgcaaaaaaaaaaaaaaaa

SEQ ID NO: 1717 - DNA, 2200 bp, Homo sapiens
cttccgtcggccattttaggtggtccgcggcggcgccattaaagcgaggaggaggcgagagcggccgccgctggtgcttattcttttttagtgcagcgggagagagcgggagtgtgcgccgcgcgagagtgggaggcgaagggggcaggccagggagaggcgcaggagcctttgcagccacgcgcgcgccttccctgtcttgtgtgcttcgcgaggtagagcgggcgcgcggcagcggcggggattactttgctgctagtttcggttcgcggcagcggcgggtgtagtctcggcggcagcggcggagacactagcactatgtcggaggagcagttcggcggggacggggcggcggcagcggcaacggcggcggtaggcggctcggcgggcgagcaggagggagccatggtggcggcgacacagggggcagcggcggcggcgggaagcggagccgggaccgggggcggaaccgcgtctggaggcaccgaagggggcagcgccgagtcggagggggcgaagattgacgccagtaagaacgaggaggatgaagggaaaatgtttataggaggccttagctgggacactacaaagaaagatctgaaggactacttttccaaatttggtgaagttgtagactgcactctgaagttagatcctatcacagggcgatcaaggggttttggctttgtgctatttaaagaatcggagagtgtagataaggtcatggatcaaaaagaacataaattgaatgggaaggtgattgatcctaaaagggccaaagccatgaaaacaaaagagccggttaaaaaaatttttgttggtggcctttctccagatacacctgaagagaaaataagggagtactttggtggttttggtgaggtggaatccatagagctccccatggacaacaagaccaataagaggcgtgggttctgctttattacctttaaggaagaagaaccagtgaagaagataatggaaaagaaataccacaatgttggtcttagtaaatgtgaaataaaagtagccatgtcgaaggaacaatatcagcaacagcaacagtggggatctagaggaggatttgcaggaagagctcgtggaagaggtggtggccccagtcaaaactggaaccagggatatagtaactattggaatcaaggctatggcaactatggatataacagccaaggttacggtggttatggaggatatgactacactggttacaacaactactatggatatggtgattatagcaaccagcagagtggttatgggaaggtatccaggcgaggtggtcatcaaaatagctacaaaccatactaaattattccatttgcaacttatccccaacaggtggtgaagcagtattttccaatttgaagattcatttgaaggtggctcctgccacctgctaatagcagttcaaactaaattttttgtatcaagtccctgaatggaagtatgacgttgggtccctctgaagtttaattctgagttctcattaaaagaaatttgctttcattgttttatttcttaattgctatgcttcagaatcaatttgtgttttatgccctttcccccagtattgtagagcaagtcttgtgttaaaagcccagtgtgacagtgtcatgatgtagtagtgtcttactggttttttaataaatccttttgtataaaaatgtattggctcttttatcatcagaataggaaaaattgtcatggattcaagttattaaaagcataagtttggaagacaggcttgccgaaattgaggacatgattaaaattgcagtgaagtttgaaatgtttttagcaaaatctaatttttgccataatgtgtcctccctgtccaaattgggaatgacttaatgtcaatttgtttgttggttgttttaataatacttccttatgtagccattaagatttatatgaatattttcccaaatgcccagtttttgcttaatatgtattgtgctttttagaacaaatctggataaatgtgcaaaagtacccctttgcacagatagttaatgttttatgcttccattaaataaaaaggacttaaaatctgttaattataatagaaatgcggctagttcagagagatttttagagctgtggtggacttcatagatgaattcaagtgttgagggaggattaaagaaatatataccgtgtttatgtgtgtgtgctt

SEQ ID NO: 1718 - DNA, 539 bp, Homo sapiens
ctttctttttgaggaagacgcggtcgtaagggctgaggatttttggtccgcacgctcctgctcctgactcaccgctgttcgctctcgccgaggaacaagtcggtcaggaagcccgcgcgcaacagccatggcttttaaggataccggaaaaacacccgtggagccggaggtggcaattcaccgaattcgaatcaccctaacaagccgcaacgtaaaatccttggaaaaggtgtgtgctgacttgataagaggcgcaaaagaaaagaatctcaaagtgaaaggaccagttcgaatgcctaccaagactttgagaatcactacaagaaaaactccttgtggtgaaggttctaagacgtgggatcgtttccagatgagaattcacaagcgactcattgacttgcacagtccttctgagattgttaagcagattacttccatcagtattgagccaggagttgaggtggaagtcaccattgcagatgcttaagtcaactattttaataaattgatgaccagttgttaaaaaaaaaaaaaaaaaa

SEQ ID NO: 1719 - DNA, 723 bp, Homo sapiens
gcgcactcagggtctgaggcagctagtagccggagggtcaccatgaagttcaatcccttcgttacctcggaccgcagtaaaaaccgcaaacgtcacttcaatgccccctcacacgtgcgcaggaagatcatgtcatccccgctctccaaggagctgcggcagaagtacaatgtccgctccatgcccatccgcaaggacgacgaggtccaggtagttcgaggacactacaaaggtcagcaaattggcaaggtagtccaggtgtacagaaagaaatatgtcatctacatcgagcgggtgcagcgtgagaaggccaacggcacaactgtccacgtgggcattcacccaagcaaggtggttatcaccaggctaaaactggacaaggatcggaaaaaaattcttgaacgcaaagccaagtctcgacaagttggaaaagagaaaggcaaatataaagaagaacttattgagaaaatgcaggaataaatagaacctgttgtgcaaccacggtttaaccggagattttgaggctagggtgtgtttctttcgaacttttcggaatgtctggaacatttcatttcctgttttgttacctgtgcctctgtaaatctacttttgcaattttaagtaataattttatgaataaaaatgggaaatgcttcctaattccacatagtatttgcattgttttataaataaattccacttactatcaaaaaaaaaaaaaaa

SEQ ID NO: 1720 - DNA, 2546 bp, Homo sapiens; identical to SEQ ID NO: 850

SEQ ID NO: 1721 - DNA, 7497 bp, Homo sapiens
ggagcctggaggactagcgaggaggagttgagagaacggagcggacgccatggcgaccaacatcgagcagatttttaggtctttcgtggtcagtaaattccgggaaattcaacaggagctttccagtggaaggaatgaaggccagctgaatggtgaaacaaatacacccattgaaggaaaccaggcgggtgatgcagctgcctctgccaggagtctaccaaatgaagaaatagtgcagaagatagaggaagtactttctggggtcttagatacagaactacgatataagccagacttgaaagagggctccagaaaaagtagatgcgtatctgtacaaacagatcctactgatgaaattcccactaaaaagtcaaagaagcataaaaagcacaaaaacaaaaagaagaaaaagaagaaagaaaaggaaaaaaaatataaaagacagccagaagaatctgagtcaaagacgaaatctcatgatgatgggaacatagatttagaatctgattcctttttaaagtttgattctgaaccttcagctgtggcgctggagcttcctacaagagcatttggcccatctgagaccaatgaatcccctgcagttgtgctagaacctcctgtagtatcaatggaggtatcagagccacacatcttagaaactctgaagccagctacaaaaactgcagaactgtcagttgtatctacatcagtaatctcagagcagtcagagcagtctgtggcagtaatgccagaaccatccatgacaaagattctggattcctttgcagcagcaccagtgcctactacaacactggtgttgaagtcatctgagccagttgtaacaatgtcagtggagtatcagatgaagtctgtgctgaaatctgtggagagcacatctccagagccatcaaagatcatgttggtagagcccccagtagcaaaagtgttagagccttcagaaacccttgtggtatcatcagagacacctactgaggtgtaccctgagccaagcacatcaacaacaatggattttccagagtcatctgcaattgaagcgctaagattgccagagcagcctgtagacgtaccatcggagattgcagattcatccatgacaagaccgcaggagttgccggagctgcctaagaccacagcgttggagctgcaggagtcgtcggtggcctcagcgatggagttgccggggccacctgcgacctccatgccggagttgcaggggccccctgtgactccagtgctggagttacctgggccctctgctaccccggtgccagagttgccagggcccctttctaccccagtgcctgagttgccagggccccctgcgacagcagtgcctgagttgccagggccctctgtgacaccagtgccacagttgtcgcaggaattgccagggcttccagcaccatccatggggttggagccaccacaggaggtaccagagccacctgtgatggcacaggagttgccagggctgcctttggtgacagcagcagtagagttgccagagcagcctgcggtaacagtagcaatggagttgaccgaacaacctgtgacgacgacagagttggagcagcctgtggggatgacaacggtggaacatcctgggcatcctgaggtgacaacggcaacagggttgctggggcagcctgaggcaacgatggtgctggagttgccaggacagccagtggcaacgacagcgctggagttgccggggcagccttcggtgactggggtgccagagttgccagggctgccttcggcaactagggcactggagttgtcggggcagcctgtggcaactggggcactagagttgcctgggccgctcatggcagctggggcactggagttctcggggcagtctggggcagctggagcactggagcttttggggcagcctctggcaacaggggtgctggagttgccagggcagcctggggcgccagagttgcctgggcagcctgtggcaactgtggcgctggagatctctgttcagtctgtggtgacaacatcggagctgtcaacgatgaccgtgtcgcagtccctggaggtgccctcgacgacagcgctggaatcctataatacggtagcacaggagctgcctactacattagtgggggagacttctgtaacagtaggagtggatcccttgatggccccagaatcccatatattagcttctaacaccatggagacccatatattagcatccaacaccatggactcccaaatgctagcgtccaacaccatggactcccagatgctagcatccaacaccatggactcccagatgttagcgtctagcaccatggactcccagatgttagcaactagctccatggactcccagatgttagcaactagctccatggactcccagatgttagcaactagcactatggactcccagatgttagcaaccagttccatggactcccagatgttagcaaccagctccatggactcccagatgttagcaaccagctccatggactcccagatgttagcaaccagctccatggactcccagatgttagcaaccagcaccatggattctcagatgttagcaaccagcaccatggactcccagatgttagcaactagctcaatggattcccagatgttagcatctggcactatggactctcaaatgttagcttctggcaccatggatgctcagatgttagcgtctggtaccatggatgcccagatgttagcgtctagtacccaagattctgctatgttgggttcaaaatctcctgatccctataggttagctcaggatccttacaggttagctcaggatccctataggttgggccatgacccctatagattaggtcatgatgcttacaggttaggacaagacccttatagattaggccatgatccctacagactaactcctgatccctataggatgtcacctagaccctacaggatagcacccaggtcctatagaatagcacccaggccatataggttagcacctagacccctgatgttagcatctagacgttctatgatgatgtcctatgctgcagaacgttccatgatgtcatcttacgaacgctctatgatgtcttatgagcggtctatgatgtcccctatggctgaacgctctatgatgtcagcctacgagcgctctatgatgtcagcctacgagcgctctatgatgtcccctatggctgagcgctctatgatgtcagcttatgaacgctccatgatgtcagcttatgaacgctccatgatgtccccaatggctgatcgatctatgatgtccatgggtgctgaccggtctatgatgtcgtcatactctgctgctgaccggtctatgatgtcatcgtactctgcagctgaccgatctatgatgtcatcttatactgctgatcgttcaatgatgtctatggctgctgattcttacaccgattcttacactgacacatatacagaggcatatatggtgccacctttgcctcctgaagagcccccaacaatgccaccgttgccacctgaggagccaccaatgacaccaccattgcctcctgaggaaccaccagagggtccagcattgcccactgagcagtcagcattaacagctgaaaatacttggcctacagaggtgccatcatcaccatctgaagagtctgtatcgcagcctgagcctcctgtgagtcaaagtgagatttcggagccttcagcagtgcctactgattattcagtgtcagcatcagatccctcagttttagtatcagaggctgctgtgactgttccagaaccaccaccagagccagaatcttcaattacgttaacacctgtagagtctgcagtagtagcagaagaacatgaagttgttccagagagaccagtgacttgtatggtatctgaaactcccgccatgtcagctgaaccaactgtgttagcatcagagcctcctgttatgtcagagacagcagaaacatttgattccatgagagcctcaggacatgttgcctcagaagtatctacatccttgttggttccagcagtaactactccagtgctggcagagagcattctggagccgccagccatggctgccccagagtcttcagctatggctgtcctggagtcttcggctgtgaccgtcctggagtcttcgactgtgactgtcctggagtcttcgactgtaactgtcctggagccttcggttgtgactgtcccggagcctcctgttgtggctgagccagactatgttaccattcctgtgccagttgtttctgcgctggagccttctgtgcctgttctggaaccagcggtgtcagtccttcaaccttctatgattgtttcagaaccatctgtttctgtccaggaatcgactgtgacagtttcagagcctgctgtcacagtctcagagcagactcaagtaataccaactgaggtggctatagagtccacaccaatgatactggaatctagtatcatgtcatcacatgttatgaaaggaattaatctatcctctggtgatcaaaatcttgctccagagattggcatgcaggagattgcattgcattcaggtgaagaaccacatgctgaggaacacctgaaaggtgacttttacgaaagtgaacatggtataaatatagaccttaatataaataatcatttaattgctaaagagatggaacataatacagtgtgtgctgctggtactagtcctgttggggaaattggtgaagagaaaattttgcccaccagtgagactaaacagcgcacagtattggatacctaccctggtgttagtgaagctgatgcaggagaaactctatcttctactggtccttttgctctggaacctgatgcaacaggaactagtaagggtattgaatttaccacagcatctactctcagtttagttaataaatatgatgttgatttatctttaactactcaagatactgaacatgacatggtaatttccaccagtcctagtggtggtagtgaagctgacattgaagggcctttgcctgctaaagatattcatcttgatttaccatctaataataaccttgttagtaaggatacagaagaaccattacctgtaaaagagagtgaccagacattagcagctctgctcagccctaaagaaagtagtggaggagaaaaagaagtacctccccctcctaaagagacactgcctgattcaggattttctgccaatattgaggatattaatgaagcagatttagtgagaccgttacttcctaaggacatggaacgtcttacaagccttagagctggcattgaaggacctttacttgcaagtgatgttggacgtgacagatctgctgccagcccggttgtaagtagtatgccagaaagagcttcagagtcttcttcagaggaaaaagatgattatgaaatttttgtaaaagttaaggacactcacgaaaaaagcaagaaaaataagaaccgtgataagggggagaaagagaagaaaagagactcttcattaagatctcgaagtaagcgttccaaatcttctgaacacaaatcacgcaagcgtaccagtgaatctcgttctagggcaagaaagagatcatctaagtccaagtctcatcgctctcagacacgttcacggtcacgttcaagacgcaggaggagaagcagcagatcaagatcaaagtctagaggaagaagatctgtatcaaaagagaagcgcaaaagatctccaaagcacagatccaagtctagggaaagaaaaagaaaaagatcaagctccagggataaccgaaagacagttagagctcgaagtcgaaccccaagtcgtcggagtcggagtcatactccaagtcgtcgacgaaggtctagatctgtgggtagaagaaggagctttagcatttccccaagccgccgcagccgcacccccagccgccgcagccgcacccccagccgccgcagccgcacccccagccgccgcagccgcacccccagccgccggagccgcacccctagccgtcggagccgcaccccaagccgccggagaagatcaaggtctgtggtaagaagacgaagcttcagtatctcaccagtcagattaaggcgatcaagaacacccttaagaagaaggtttagcagatctcccatccgtcgtaaaagatccaggtcttctgaacgaggcagatcacccaaacgtctgacagatttggataaggctcaattacttgaaatagccaaagctaatgcagctgccatgtgtgctaaggctggtgtccctttaccaccaaacctaaagcctgcacctccacctactatagaagagaaagttgctaaaaagtcaggaggagctactatagaagaactaactgagaaatgtaaacagatcgcacagagtaaagaagatgatgatgtaatagtgaataaacctcatgtttcggatgaagaggaagaagaacctcctttttatcatcatccctttaaactcagtgaacccaaacctatttttttcaatctgaatattgctgcagcaaaaccaactccaccaaaaagccaggtaacattaacaaaagaattccctgtatcatctggatctcaacatcggaaaaaagaagcggatagtgtttatggagaatgggttcctgtggagaaaaatggtgaagaaaacaaagatgatgataatgttttcagcagcaatttgccctcagagggccgggttaaacggcagggccgggttagacgacagatgaaacaacccgcagcttctcatttgacagtaactcgatgcaattcactttgtggaaccaagccacaaagtgaaaagcatcgaattgcagagaacagtgttatcacatccctacccaacattgggccctccctgcacttgtgggaaggtagtccaaggtacaactatttagcttcccgatttgcttcaaggctctatagctctagattttggtggtagcaaatttatcgggtggagggattgatcggagagggcagatcctcaggttcaacacaagaactggattggaaaaggtcattgtaggttgatgtgagcatcttgggtacatagcccattgcccttaatgatggtttcttactgtttctctgggttgtttgtcagatagcctttaattttaattatttttccttccctttgctaccttggcccttttaaattcttgtgtttaacctaatgctcagccttggtactccattcccttctccttcccctctttgctactattaaaagtcggagaagtggaattcaaacgttgaaatttccacggggctatagttgtatcttaataatgccaagtgtcaaaacaaccccattaaaatgccgcctgattaaataatgtgctgctaaatatagtgcacatgaaaacagcaagactgtatatatatgtaaatatatatatatatctgtatctttgtatgtatctctgtatctgtacctttgctgtatcttttaataaacagtttacttttatttaa

SEQ ID NO: 1722 - DNA, 2083 bp, Homo sapiens
ggtttttagaacttcagccataaaaatgggcagaattttccttgatcatatcggtggtacccgtctgttttcttgtgcaaactgtgatacgatcctgaccaaccgctcagaactcatctccactcgtttcacaggcgccactggcagagcatttctttttaacaaggtagttaacctgcagtacagcgaagttcaagatcgggtcatgctcactggccgccacatggttcgagatgtgagctgcaaaaactgcaatagcaaactgggatggatctatgagtttgccactgaagacagccagcgatataaggaaggccgcgtgatcctggaacgtgctctagttcgagagagtgagggctttgaggagcatgtaccatctgataactcttgaagatacagagagaaatccatcttttcccaggtctccttcactgaaaacaaaaatctacttacatacactgtcaccttagcatcagagtcggattaatgaactgcggaacaagaggttgtgagaatctaagatggaacctttctttctttctttctttttttttaaattttgtattttccatccaacagcagtgtgtagagagaatattatgcagatgccgttaattttttaccctatgtttacatcttgaggcagcagagtctgtctgcagctatgtggtgagctatgtaaggaaaaaaatctgggctgttagagtgaaaaagtgtgttttatgtcaattgtgaaaggaaaatgttaggagtatggtttttaaacttgggcttcattttaaacttttttttttaaacccagttatttcacttgatttgctagcttcagagaagagatccgaatctgtgcccagcgctaaaggctcagtgttagcatggcttgtgctggccggtgtgccatattcttgttggagatgaaccgtagcaccagagcccattcttccttgtcagtcttggcccaaagatgtcaccattcctagttatttgtcaccacataattggtgttgattggaaactttttctgagatgggacagaactgctgggttgtctttttccatgtaacttaagcatagtaatataaataaagtaatagttggatgcttttggtcctgtgttgcttttaaaaacaccttataaaagaggagagtatttgataagcaattttcatagtagtaaagttttttttcatctcttaaactaaattgaccatgcatataatattctttgtttaaatgaaagcatactgttgaaacccgcagtgttgcatttagaaaacagttgaacagaatgtcaatgtgcattcatgcaaaaaaacatttaatctgcatctgttttagaaaagggggaaatgaagcaacttgtctaaaaatactgctttacaaagcatttcagcctttccccctcagttttgcattgattttttgacaagtctgtagagcctaatagtttccatcaaaggcctagatctcttatttagcatttttttcagctcttctctcagaagttcagctgttgaaacgaaaactgtactttgtaccctcacatacaaagggatcaaatttgacctggtgttattttagccccaaatttatgacattacacaatattaaaatgtaaatgtttctttacccaaactacttctagatattctagtatttgcttctggtggaattaaatgacggtaaaattggctaattatttgaatgaatgaatggatggatgttttgcatgctcaatttctaggtcctttgtctagaaaggaaatttgcctcagttgaattagtgaaatatttctgtcgttgatattaaaagtgacttctgagtacagttaagttcctcctatttgccactgggctgttggttagaagcataggtaactgattaagtaggtatgatactgcatttgaaataagtggacacaaactatcctttctccaccatggactcaatctgagaacaacagcattcatttccattcatttccatactggcttttgattatatgcagattcctagtagcatgccttacctacagcactatgtgcatttgctgtcacaataaagtatattttgtcttgcaaa

SEQ ID NO: 1723 - DNA, 1633 bp, Homo sapiens
cccacgtgacgggcgcccgcggaaggcgacatgggctccgctccctgggccccggtcctgctgctggcgctcgggctgcgcggcctccaggcgggggcccgcagggccccggaccccggcttccaggagcgcttcttccagcagcgtctggaccacttcaacttcgagcgcttcggcaacaagaccttccctcagcgcttcctggtgtcggacaggttctgggtccggggcgaggggcccatcttcttctacactgggaacgagggcgacgtgtgggccttcgccaacaactcggccttcgtcgcggagctggcggccgagcggggggctctactggtcttcgcggagcaccgctactacgggaagtcgctgccgttcggtgcgcagtccacgcagcgcgggcacacggagctgctgacggtggagcaggccctggccgacttcgcagagctgctccgcgcgctacgacgcgacctcggggcccaggatgcccccgccatcgccttcggtggaagttatggggggatgctcagtgcctacctgaggatgaagtatccccacctggtggcgggggcgctggcggccagcgcgcccgttctagctgtggcaggcctcggcgactccaaccagttcttccgggacgtcacggcggactttgagggccagagtcccaaatgcacccagggtgtgcgggaagcgttccgacagatcaaggacttgttcctacagggagcctacgacacggtccgctgggagttcggcacctgccagccgctgtcagacgagaaggacctgacccagctcttcatgttcgcccggaatgccttcaccgtgctggccatgatggactacccctaccccactgacttcctgggtcccctccctgccaaccccgtcaaggtgggctgtgatcggctgctgagtgaggcccagaggatcacggggctgcgagcactggcagggctggtctacaacgcctcgggctccgagcactgctacgacatctaccggctctaccacagctgtgctgaccccactggctgcggcaccggccccgacgccagggcctgggactaccaggcctgcaccgagatcaacctgaccttcgccagcaacaatgtgaccgatatgttcccggacctgcccttcactgacgagctccgccagcggtactgcctggacacctggggcgtgtggccccggcccgactggctgctgaccagcttctgggggggtgatctcagagccgccagcaacatcatcttctccaacgggaacctggacccctgggcagggggcgggattcggaggaacctgagtgcctcagtcatcgccgtcaccatccaggggggagcgcaccacctcgacctcagagcctcccacccagaagatcctgcttccgtggttgaggcgcggaagctggaggccaccatcatcggcgagtgggtaaaggcagccaggcgtgagcagcagccagctctgcgtggggggcccagactcagcctctgagcacaggactggaggggtctcaaggctcctcatggagtgggggcttcactcaagcagctggcggcagagggaaggggctgaataaacgcctggaggcctggccatgtaaaaaaaaaaaaaaaaa

SEQ ID NO: 1724 - DNA, 2176 bp, Homo sapiens
gaacccggtctcccgcaagatggagccgggttgggctgtgacgctgctgctggggtcagaatgtcatacccaggctatcccccaacaggctacccacctttccctggatatcctcctgcaggtcaggagtcatcttttcccccttctggtcagtatccttatcctagtggctttcctccaatgggaggaggtgcctacccacaagtgccaagtagtggctacccaggagctggaggctaccctgcgcctggaggttatccagcccctggaggctatcctggtgccccacagccagggggagctccatcctatcccggagttcctccaggccaaggatttggagtcccaccaggtggagcaggcttttctgggtatccacagccaccttcacagtcttatggaggtggtccagcacaggttccactacctggtggctttcctggaggacagatgccttctcagtatcctggaggacaacctacttaccctagtcagatcaatacagattctttttcttcctatcctgttttctctcctgtttctttggattatagcagtgaacctgccacagtgactcaggtcactcaaggaactatccgaccagctgccaacttcgatgctataagagatgcagaaattcttcgtaaggcaatgaagggttttgggacagatgagcaggcaattgtggatgtggtggccaaccgttccaatgatcagaggcaaaaaattaaagcagcatttaagacctcctatggcaaggatttaatcaaagatctcaaatcagagttaagtggaaatatggaagaactgatcctggccctcttcatgcctcctacgtattacgatgcctggagcttacggaaagcaatgcagggagcaggaactcaggaacgtgtattgattgagattttgtgcacaagaacaaatcaggaaatccgagaaattgtcagatgttatcagtcagaatttggacgagaccttgaaaaggacattaggtcagatacatcaggacattttgaacgtttacttgtgtccatgtgccagggaaatcgtgatgagaaccagagtataaaccaccaaatggctcaggaagatgctcagcgtctctatcaagctggtgaggggagactagggaccgatgaatcttgctttaacatgatccttgccacaagaagctttcctcagctgagagctaccatggaggcttattctaggatggctaatcgagacttgttaagcagtgtgagccgtgagttttccggatatgtagaaagtggtttgaagaccatcttgcagtgtgccctgaaccgccctgccttctttgctgagaggctctactatgctatgaaaggtgctggcacagatgactccaccctggtccggattgtggtcactcgaagtgagattgaccttgtacaaataaaacagatgttcgctcagatgtatcagaagactctgggcacaatgattgcaggtgacacgagtggagattaccgaagacttcttctggctattgtgggccagtaggagggatttttttttttttaatgaaaaaaaaatttctattcatagcttatccttcagagcaatgacctgcatgcagcaatatcaaacatcagctaaccgaaagagctttctgtcaaggaccgtatcagggtaatgtgcttggtttgcacatgttgttattgccttaattctaattttattttgttctctacatacaatcaatgtaaagccatatcacaatgatacagtaatattgcaatgtttgtaaaccttcattcttactagtttcattctaatcaagatgtcaaattgaataaaaatcacagcaatctctgattctgtgtaataatattgaataattttttagaaggttactgaaagctctgccttccggaatccctctaagtctgcttgatagagtggatagtatgttaaaactgtgtactttaaaaaaaaattcaacctttacatctagaataatttgcatctcattttgcctaaattggttctgtattcataaacactttccacatagaaaatagattagtattacctgtggcaccttttaagaaagggtcaaatgtttatatgcttaagatacatagcctccctttttttcgcgttgtttcctttttttaaattgagttatgacaaataaaaaattgcatat

SEQ ID NO: 1725 - DNA, 1521 bp, Homo sapiens
gggtttggggagagaggggcggagggactggcgggctcttggcgtcttgggggaacgctgcaaccgtcgacgggcctgatcagaagatcgtctttctcccgtttcttcgccatcgctaccccttatttttggttgtattgcagctcatgccctggaaaaaagaacctttggggttaaaaacgacaaccaacatcagccatgaaagatccaagtcgcagcagtactagcccaagcatcatcaatgaagatgtgattattaacggtcattctcatgaagatgacaatccatttgcagagtacatgtggatggaaaatgaagaagaattcaacagacaaatagaagaggagttatgggaagaagaatttattgaacgctgtttccaagaaatgctggaagaggaagaagagcatgaatggtttattccagctcgagatctcccacaaactatggaccaaatccaagaccagtttaatgaccttgttatcagtgatggctcttctctggaagatcttgtggtcaagagcaatctgaatccaaatgcaaaggagtttgttcctggggtgaagtacggaaatatttgagtagacggggccctcttttggtggatgtagcacaatttccacactgtgaaggcagtattagaagacttaattgtaaaagctctcttgtcactgtgttacacttatgcattgccaaagtttttgttagtcttgcatgcttaataaaagtgctgagactgttactaagtaaaaagctgtcaaacatttactgaaaatagaattggccccatggcttgatgtgaagacagcaaggaaagaagcaccagtcaagttgtgaacaagcaccaaattaaaagacctaaaccttaccaaattgtctttttttgaggctaatctatcacttgttaatgtctaaactttaaaatcagtacatttaatttgagttccaactgttaagcatatttctcagacttaaatttgattatgtccccatcaaaaagaatctccattttctgaaggtctgttagttaatttgagataatttgttaaaggcaagtatgtcatattactgaggctacaagttagtcagcagatgagtgccagtccagccttttctggtatgttattgttagaaatattgagttctaatgttacatctgaggaagtatgtaatttgagaattgtaacttctaagggattcactgcatcatagctatgcctgtatggagtctaacatatgaccaataccaacccataatccagctgaacaaagatactgtaacatgatttgagtggtgcttttccttgctttgttaaccatcacgagagtctgcagcacaacttttaacaaagctagaacagttttggcttcttaaacttcatatttgggtaggttaagctgccatacgtgttcagtgtgaatagtgtttaagttgaaaatattgtaaaaaaattatattttttcaaaaatatttaaaaaaataaataatagtagaactgagcaaaaaaaaaaaaaaaaaa

SEQ ID NO: 1726 - DNA, 2931 bp, Homo sapiens
agggggagcggagggaggtgtttctgtcagttccggctgtttgttcgggaagtggatccgccgctgccggagcagcccgaagggagctgcggatcgcgaggccagtaccgaccccgcccgcccgcgcgcaccgcccccgcccgccatggcccgggactacgaccacctcttcaagctgctcatcatcggcgacagcggtgtgggcaagagcagtttactgttgcgttttgcagacaacactttctcaggcagctacatcaccacgatcggagtggatttcaagatccggaccgtggagatcaacggggagaaggtgaagctgcagatctgggacacagcggggcaggagcgcttccgcaccatcacctccacgtattatcgggggacccacggggtcattgtggtttacgacgtcaccagtgccgagtcctttgtcaacgtcaagcggtggcttcacgaaatcaaccagaactgtgatgatgtgtgccgaatattagtgggtaataagaatgacgaccctgagcggaaggtggtggagacggaagatgcctacaaattcgccgggcagatgggcatccagttgttcgagaccagcgccaaggagaatgtcaacgtggaagagatgttcaactgcatcacggagctggtcctccgagcaaagaaagacaacctggcaaaacagcagcagcaacaacagaacgatgtggtgaagctcacgaagaacagtaaacgaaagaaacgctgctgctaatggcacccagtccactgcagagactgcactgcggtccctcccccagcccgaggcccacggaggttcctcgggggacagtctcagtttcgtgccgttatttaaagaattctctccatgtttttgtatcgggaggtgccatcggcacttcctcccccgccctcctcgagtgccaagaaggtgttggaccagcccgcccttccctactggtgccccctcctccccggccaaggcgcctggacctggcgaggacgctgcccgccgagcggactgattcgcagagtctgtacatagtgtatattgctctacccggccgcacaccacgtcctgctctggcttttgccttcttgatgccagcctgctgcaacagaccctccccgcgcccctccccagcccatcttactgcaagcagcgtcctgaggagacagcggcacgttctagctgcgtctgcggccagcccgtgccagtggagtgggctccgcgttgctcattctctccgacaggttgtcagcctctgtccccgctgcacagggtcttgccccttctccggggcctgtgccagctcccttccctccccgttgtcctgtccccacagccattctgggagctggggaacctggtctcaaggcaggccctgcagttccacagaggtggcaggtcttgccctttggccaacagatttcttgtcctgccttctagatgcctctgagctccaaacccagggcagccatggcttctcatttacaccaacaggtttcagttccaacagaaaggtcggggtaggttcgtgcagagatggggctggcaggggggctatgggaggattattttaacagatcaagaaaatgaagccaaatcaagtgaattaaattcctcacaattattttctttccctgaggtttgattggcacagcagcaaaagttgaggccaccccacttgtgtccactgtttttagaaaaaaatgaatggcttcctgccattgtggggctggactcttgggctttcttggtgggagcggagaaggggcctcccacccttgtccgagttgcctcccactggaggtcaggagtctacactgcagcctcgggcactgtggggagtgcatgcctggggcctctgggtggggaccatggacaggccctggtcactgtcctaacctttgtcaggacaaaggtagcaagaggatttcctggcgggtgggaaggaatggctggggcggccagttttgacacgccccagtgccctggagaacaaccagggtcatctgcacttgatgactgctccccgacccccagcccggacacctcattcccctcccactacagggatcaagtgacctgggaagaaccgagtttaacaccaggatgtgtttccttagatttcctttcctaggcgatttccagggagagccctgattggacaatcacatcacagatcacactgcagtttccatgttagcactgtggatgggtttttaatcaataaaaactgggggtttcttctcaccgactctccacttgcccaaactgccaaaagctggtgattctgggacaggccttcactttggagccacgggatggggtgggggagccccatgggcctgggaaggagggtgctgtggagggggctgcagggctgaccagcaggcagcctcatctggtcgggggcgggggcggcaggagcagaagcggggtctccgtccttgggactgtcctggttggccacgggccctgaggatgcacggtgcctggggctcctgtgccggtgggcggggggcatgctggcctctgagcgatcaggcgaggccagcgagggtgtgcttgcaaattcaagcaataagaggggggttcctgggggcttccagcccaggctagaagcccccatggcttctggcagctggacatcagccccaggtattggggtgattttggtcatgacagtgtgcctgtcccactgttacacgcatgaatgggggttatggggtgggggtggggactcagggctggaccgacgtcctagtggacctgatgtgaaattcctgtcaaacaaacaccacttttcaatggtttgctaggagtatttctgtattgaaagtttctaattatgctttttaaaaaaatactaaaaataaaggttcaagctgccaaaaaaaaaaaaaaaaaaaaaaaaaaaaaaaaaaaaa

SEQ ID NO: 1727 - DNA, 1693 bp, Homo sapiens
ggcggggtttcccgcgctcggcggaagcggaaggggcggggctccgcgctcctagtctccactgctgccgccgtcgccgccacccgagccggagcgggctgggccgccaaggcaagatggtggactacagcgtgtgggaccacattgaggtgtctgatgatgaagacgagacgcaccccaacatcgacacggccagtctcttccgctggcggcatcaggcccgggtggaacgcatggagcagttccagaaggagaaggaggaactggacaggggctgccgcgagtgcaagcgcaaggtggccgagtgccagaggaaactgaaggagctggaggtggccgagggcggcaaggcagagctggagcgcctgcaggccgaggcacagcagctgcgcaaggaggagcggagctgggagcagaagctggaggagatgcgcaagaaggagaagagcatgccctggaacgtggacacgctcagcaaagacggcttcagcaagagcatggtaaataccaagcccgagaagacggaggaggactcagaggaggtgagggagcagaaacacaagaccttcgtggaaaaatacgagaaacagatcaagcactttggcatgcttcgccgctgggatgacagccaaaagtacctgtcagacaacgtccacctggtgtgcgaggagacagccaattacctggtcatttggtgcattgacctagaggtggaggagaaatgtgcactcatggagcaggtggcccaccagacaatcgtcatgcaatttatcctggagctggccaagagcctaaaggtggacccccgggcctgcttccggcagttcttcactaagattaagacagccgatcgccagtacatggagggcttcaacgacgagctggaagccttcaaggagcgtgtgcggggccgtgccaagctgcgcatcgagaaggccatgaaggagtacgaggaggaggagcgcaagaagcggctcggccccggcggcctggaccccgtcgaggtctacgagtccctccctgaggaactccagaagtgcttcgatgtgaaggacgtgcagatgctgcaggacgccatcagcaagatggaccccaccgacgcaaagtaccacatgcagcgctgcattgactctggcctctgggtccccaactctaaggccagcgaggccaaggagggagaggaggcaggtcctggggacccattactggaagctgttcccaagacgggcgatgagaaggatgtcagtgtgtgacctgccccagctaccaccgccacctgcttccaggcccctatgtgccccttttcagaaaacagatagatgccatctcgcccgctcctgacttcctctacttgcgctgctcggcccagcctggggggcccgcccagccctccctggcctctccactgtctccactctccagcgcccattcaagtctctgctttgagtcaaggggcttcactgcctgcagccccccatcagcattatgccaaaggcccgggggtccggggaagggcagaggtcaccaggctggtctaccaggtagttggggagggtccccagccaaggggccggctctcgtcactgggctctgttttcactgttcgtctgctgtctgtgtcttctatttggcaaacagcaatgatcttccaataaaagatttcagatgctcaaaaaaaaaaaaaaaaaaaaaa

SEQ ID NO: 1728 - DNA, 2158 bp, Homo sapiens
ccgttgccgccgccgccgctgccgccgtgctctcgctttgcccgccgccgcctaaggggggctggggccggggccagccatcactgccgttgccgggatgccgcgggtgtacatcggccgcctgagctaccaggcccgggagcgcgatgtggagcgcttctttaagggctacgggaagatcctggaggtggatctgaagaacggatatggttttgtggagtttgatgatctgcgtgatgcagatgatgctgtttatgaactgaatggcaaagacctttgtggtgagcgagtaattgttgagcatgcccgcggcccacggcgagatggcagttacggttctggacgcagtggatatggttatagaagaagtggccgagataaatatggccctcctactcgcacagagtacagacttattgtggagaatttgtcaagtcggtgcagctggcaagacctaaaggattatatgcgtcaggcaggagaagtgacttatgcagatgctcacaagggacgcaaaaatgaaggggtgattgaatttgtatcttattctgatatgaaaagagctttggaaaagttggatggaactgaagtcaatgggagaaaaatcagattagttgaagacaagccaggttccagacgacgccggtcctactccagaagccggagtcattcaaggtctcgctctcgaagcagacattcccgtaagagcagaagccgaagtggcagcagcaaaagcagtcattctaagagtagatctcggtccaggtcgggctcccgctcccggagcaagagccggagccggagccagagtcggagccggagcaagaaagagaaaagcaggagccccagcaaggaaaagagccgcagccgcagccatagcgctggcaagagccgcagcaagagcaaagaccaagctgaagagaagatccaaaacaatgacaatgtcgggaaacccaagagccggagtcctagcaggcataaaagtaagagcaaaagtcggagcaggagtcaggagaggagagtggaggaggagaagcgagggagtgtgagcaggggcaggagccaggagaagagcctccgccagagtcggagccggagcaggagcaaagggggcagcaggagccggagcaggagccgcagcaagagcaaggacaagaggaagggcaggaagagaagcagagaggagagccgcagtcgcagtcgcagccgcagcaagagtgagaggagcagaaagcgaggcagcaagcgagacagcaaggcgggcagcagcaagaagaagaagaaggaagacactgaccgctcccagtccagatctccatcccgctccgtgtcaaaggagcgggaacatgccaagtctgaatccagccagagggaaggtcgaggagagagtgagaatgctggcaccaatcaggagacccggtccaggtcgagatccaattccaaatcgaaaccaaaccttccatcagaatcacgctccagatcaaagtcagcttcaaaaacccgatctcggtccaagtctagatccaggtctgcttccagatcgccctcccgatctagatctaggtcccactcaaggtcctaactggctatggccacagctggaactacccgagaagtcttttgtacatgtttggtagccgtagcacaagtgattggagtagaacatgtcactgctgtacatttttaactcccctaatggtgtgtctataattgttaaatctaagtgcttcctctcagtaaagcctcctggcaccaggccttcctgctcgactgaaaaaaattttctctttgaaaatccccttttactcatggcccacagtagaatatccaaaacgccttggctttcaggcctggcctttcctacagggagctcagtaacctggacggctctaaggctggaatgaccacataggtaggtatggtgagttcaaccatttttgctcttgaattgatgcccttcgatgtatgccatttagtgaaagtgctaagtcttaagtttcctaccactttggtttcatatttttggacttaacaaagttgtgaatagcacagtcgaggaaaattgatacctgcagtaacccataggaaataaactgtagagttccatattctggtattgtgattatattgttttatattaaaaaaaaaaaaaaaaaaa

SEQ ID NO: 1729 - DNA, 1497 bp, Homo sapiens
gttggacgtgttcgcttgggttcctgctgcggcagccacctcgcaatctctctgcatcgatcgccgctcgcaagctactgaccgtactcgggcgtattaggagccgcgttccagcctcacaccccacggtgctgttttcgacttcagaaaggatctagcctcagcacagaagcgcctcaggcgcggcgcaaagctcgagcggacggcgggggcggccggagcctctctcgggggagccgcgcctgaggaggcggaagaacccccctgacgcgactggcgtgtgcttctgcccgccaccgcccctcccgctctcacccgggccgtccctggccactgcccctgccgcggaggcagcggcggcagcggctctcctttccacagccggcgctccgcgacccgcttggctcctgagcccgtcgggtaggctctcctcgagttcccgctcttcaccccttccctcaccctcttctttcgtcacccgtccccgaccccacccgagcccggcgcctcagctgcccccggccatggcgtgcggagccactctgaaaaggactctggatttcgacccgctgttgagcccggcgtccccgaagcgcaggcgatgtgcgccattgtcggcgcccacctcggccgctgcctccccgttgtcggcggccgcggccaccgccgcctccttctccgctgcggccgcctcgccgcagaagtatctccgaatggagccatcccccttcggcgacgtctcctcccgcctcaccacagaacaaattctgtacaacataaaacaagagtataaacgaatgcagaagagaagacatttagaaacgagtttccaacagacagatccgtgttgtacttctgatgcacagccacatgcatttctcctcagtggaccagcttcaccagggacttcatctgcagcatcctcaccattaaaaaaagaacagcccttatttactctacggcaggttgggatgatctgtgaacgtttgttgaaagaacgtgaagagaaagttcgagaagaatatgaagaaatattgaacacaaaacttgcagaacaatatgatgcgtttgtgaagtttacgcatgatcaaataatgcgacgatatggagaacagcctgctagctatgtttcatgaatcacgtatcctgcatttgtgggctgccttgttccttgttgagttgttgcaagaggtcccaattatgacatgcagcaatgccaataccccttctgtgaatacaggttatttcaagctttcgtcagtggcaaccactcttaggcagcagcaactggttttggaaatttccctgatgtcagtaccacctggatgtggacctttgctacctgtattaataccagtggcctcattttgctgtatcattacaatttggcttcttatattaatgtttgaaaaggattaaagctggtattctagaacatgcccttcactggttgtgtaaataaaactgtagaatgacaaaaaaaaaaaaaaaaaaaaa

SEQ ID NO: 1730 - DNA, 1679 bp, Homo sapiens
gtcgggaggagggcagacacgccgctttttggatgcctcctatgcctggcgggagtcttgtctgagctggcaccaccacacggcccacgacatcttcgcagggaagcctgtggaccctctgccaggctccacaagaggtcaggacagtgcagtgtgttcacaaggccagtttctgatcgtccgccccgaggctgaggaccagtaggcagctcccaagatgggtgaaaggaaaggggtcaacaagtactatcctccagacttcaaccctgagaagcatggctctctcaaccgataccacaacagccacccgcttcgggagcgggctcggaagctgtcacagggcatcctcatcatccgattcgaaatgccatataacatctggtgcgatggctgcaagaaccacatcggcatgggtgttcgttacaatgcagaaaagaagaaggtgggcaattactacacaaccccgatctacaggttccggatgaaatgccacctctgtgtcaactacatcgagatgcagacggaccccgccaactgcgactacgtgatcgtgagtggcgcccagcgcaaggaggagcgctgggacatggcggacaatgagcaggtgctgaccacagagcatgagaagaagcagaagctggagacggacgccatgttccggctggagcatggcgaggccgaccgcagcacactcaagaaggcgctgcccacactgagccacatccaggaggcccagagcgcctggaaggacgacttcgccctcaacagcatgctgcggagaaggttccgggaaaagaaaaaagccatccaggaggaggaggagagagaccaggccttgcaggccaaggcgagcctgaccatcccgctggtgcccgagacggaagatgaccgcaagctggcggctctgctgaagttccacaccctggactcctacgaggacaagcagaaactcaagcggaccgagatcatcagccgctcctggttcccctctgcccccggatccgcctccagcagcaaggtcagcggcgtcctgaagaagctggcacagagccgcagaaccgcgcttgccacctcccccatcaccgtcggggacctgggcatcgtgcggcggaggtctcgggacgtcccggagagcccccagcatgcggccgacacccccaagtctggggaaccgcgggtaccagaggaggctgcccaggaccggcccatgtcccccggagactgtcctccggaaacaactgagacccccaagtgcagcagcccgagggggcaggaagggagccgtcaggacaagcccctgtcgccagcaggctcctcccaggaggcagctgacacccccgacacgcggcacccctgcagtctcggctcctccctcgtggcggactactccgactcggagagtgagtgagcgatccccatcctggagactggacccgctctagaggcccggacacacccaggaggcccctcacagactgcagacccccggctcgcccaccagccctgggagagctcagatgccgcatcctccccagaccgcgccttcctgcaaccgtggagttatttatttggtcctggtgagggtgtttgtgccttgtgagactccgtacattaaagacctgtctcttcttcaaaaaaaaaaaaaaaaaaaaaaaaaaaaaaaaaaaaaaaaaaaaaaa

SEQ ID NO: 1731 - DNA, 1299 bp, Homo sapiens
agtcctcttccgggtgatggcggcgggtgccccggatgtagccctggcgcaagcatctcttcttttttccacctcgccttccgcggattcccagcttgagaaacacctctttgccccgtcatgccaaagaggaaagtgaccttccaaggcgtgggagatgaggaggatgaggatgaaatcattgtccccaagaagaagctggtggaccctgtggctgggtcagggggtcctgggagccgctttaaaggcaaacactctttggatagcgatgaggaggaggatgatgatgatggggggtccagcaaatatgacatcttggcctcagaggatgtagaaggtcaggaggcagccacactccccagcgaggggggtgttcggatcacaccctttaacctgcaggaggagatggaggaaggccactttgatgccgatggcaactacttcctgaaccgggatgctcagatccgagacagctggctggacaacattgactgggtgaagatccgggagcggccacctggccagcgccaggcctcagactcggaggaggaggacagcttgggccagacctcaatgagtgcccaagccctcttggagggacttttggagctcctattgcctagagagacagtggctggggcactgaggcgtctgggggcccgaggaggaggcaaagggagaaaggggcctgggcaacccagttcccctcagcgcctggaccggctctccgggttggccgaccagatggtggcccggggcaaccttggtgtgtaccaggaaacaagggaacggttggctatgcgtctgaagggtttggggtgtcagaccctaggaccccacaatcccacacccccaccctccctggacatgttcgctgaggagttggcggaggaggaactggagaccccaacccctacccagagaggagaagcagagtcgcggggagatggtctggtggatgtgatgtgggaatataagtgggagaacacgggggatgccgagctgtatgggcccttcaccagcgcccagatgcagacctgggtgagtgaaggctacttcccggacggtgtttattgccggaagctggacccccctggtggtcagttctacaactccaaacgcattgactttgacctctacacctgagcctgctgggggcccagtttggtgggcccttctttcctggactttgtggaggaggcaccaagtgtctcaggcagcgaggaaattggaggccatttttcagtcaatttccctttcccaataaaagcctttagttgtgtaaaaaaaaaaaaaaaa

SEQ ID NO: 1732 - DNA, 1182 bp, Homo sapiens
aggtcagcgtgtgaagtaggcgctggcaacgcggggttacccgctgttattgaggagtaacggcccagcggaccacccaggcttgaggcagcggcgggaaccactcggtttgctgcgataccatggaaggaggcgggggaagcggcaacaaaaccacagggggattggccggctttttcggagccggcggagcaggttactcgcacgcggatttggctggcgtcccgctaactggtatgaaccctctgtctccttatttaaatgtggatccacgatacctcgtgcaggatacagatgagtttattttacctaccggagctaataaaacccggggcagatttgagctggccttctttacgattggaggatgttgcatgacaggggctgcgtttggtgcaatgaatggtcttcggctaggattgaaggaaacccagaacatggcctggtccaaaccaagaaatgtacagattttgaatatggtgactaggcaaggggcactttgggctaatactctaggttctctggctttgctctatagtgcatttggtgtcatcattgagaaaacacgaggtgcagaagatgaccttaacacagtagcagctggaaccatgacaggcatgttgtataaatgtacaggtggtcttcgagggatagcacgaggtggtctgacaggactaacacttaccagcctctatgcactatataataactgggagcacatgaaaggctccttgctccaacagtcactctgaagattttgccaactcatgaatggaggacacttcagtagtcatctagatccttttataagacagtttggagttattctctctcttctacctacaattagtttgaaaaattggagattttgatttgctgtgatgaaaatcctggatggctgaccaagactggcacttgttccagccattagtgagttgaagccaaagccctttggtgactcactgagtaccatggttctgttctcctctggagatcttgcacatatctgttttcctcccccatgaactagaaaaccacttactcccagaattcaggtcgtgcttgttagtactatatcaccaagtccattcatttaatgatccaaaactgtaatgttgcactgtattccaaataaagggtaaaaacagaaccaaagttataactccaaaaaaaaaaaaaaaa

SEQ ID NO: 1733 - DNA, 1344 bp, Homo sapiens
gaaagagaacctgtaaacgctctcggaattatggcggcggtggatatccgagacaatctgctgggaatttcttgggttgacagctcttggatccctattttgaacagtggtagtgtcctggattacttttcagaaagaagtaatcctttttatgacagaacatgtaataatgaagtggtcaaaatgcagaggctaacattagaacacttgaatcagatggttggaatcgagtacatccttttgcatgctcaagagcccattcttttcatcattcggaagcaacagcggcagtcccctgcccaagttatcccactagctgattactatatcattgctggagtgatctatcaggcaccagacttgggatcagttataaactctagagtgcttactgcagtgcatggtattcagtcagcttttgatgaagctatgtcatactgtcgatatcatccttccaaagggtattggtggcacttcaaagatcatgaagagcaagataaagtcagacctaaagccaaaaggaaagaagaaccaagctctatttttcagagacaacgtgtggatgctttacttttagacctcagacaaaaatttccacccaaatttgtgcagctaaagcctggagaaaagcctgttccagtggatcaaacaaagaaagaggcagaacctataccagaaactgtaaaacctgaggagaaggagaccacaaagaatgtacaacagacagtgagtgctaaaggcccccctgaaaaacggatgagacttcagtgagtactggacaaaagagaagcctggaagactcctcatgctagttatcatacctcagtactgtggctcttgagctttgaagtactttattgtaaccttcttatttgtatggaatgcgcttattttttgaaaggatattaggccggatgtggtggctcacgcctgtaatcccagcactttgggaggccatggcgggtggatcacttgaggtcagaagttcaagaccagcctgaccaatatggtgaaaccccgtctctactaaaaatacaaaaattagccgggcgtggtggcgggcgcccatagtcccagctactcgggaggctgagacaggagacttgcttgaacccgggaggtggaggttgccctgagctgattatcatgctgttgcactccagcttgggcgacagagcgagactttgtctcaaaaaagaagaaaagatattattcccatcatgatttcttgtgaatatttgttatatgtcttctgtaacctttcctctcccggacttgagcaacctacacactcacatgtttactggtagatatgtttaaaagcaaaataaaggtatttgtata

SEQ ID NO: 1734 - DNA, 1397 bp, Homo sapiens
cggctccgctgcggaaggcggacgactagagtcgttgggcccggcgcgacccgcaggagcgtagagagcgcgggactagagtgcagagctccgggacgtggatcggagccggcgcgatgggcggagagcaggaggaggagcggttcgacggcatgttgctggccatggctcagcagcacgagggcggcgtgcaggagcttgtgaacaccttcttcagcttccttcgacgcaaaacagactttttcattggaggagaagaagggatggcagagaagcttatcacacagactttcagccaccacaatcagctggcacagaagacccggcgggagaagagagcccggcaggaggccgagcggcgggagaaggcggagcgggcggccagactggccaaggaagccaagtcagagacctcagggccccagatcaaggagctaactgatgaagaggcagagaggctgcagctagagattgaccagaaaaaggatgcagagaatcatgaggcccagctcaagaacggcagccttgactccccagggaagcaggatactgaggaagatgaggaggaagatgagaaggacaaaggaaaactgaagcccaacctaggcaacggggcagacctgcccaattaccgctggacccagaccctgtcggagctggacctggcggtccctttctgtgtgaacttccggctgaaagggaaggacatggtggtggacatccagcggcggcacctccgggtggggctcaaggggcagccagcgatcattgatggggagctctacaatgaagtgaaggtggaggagagctcgtggctcattgaggacggcaaggtggtgactgtgcatctggagaagatcaataagatggagtggtggagccgcttggtgtccagtgaccctgagatcaacaccaagaagattaaccctgagaattccaagctgtcagacctggacagtgagactcgcagcatggtggaaaagatgatgtatgaccagcgacagaagtccatggggctgccaacttcagacgaacagaagaaacaggagattctgaagaagttcatggatcaacatccggagatggatttttccaaggctaaattcaactagcccctgttttttcctccctgaactcttggggctgagctgcaaccacccaactttctttcccactcttctctgggacttgtgggcctcagggcttggggcaggcatgggactggcccaggcacacaggtcccggggcatcaggagaaaggctgggtcttgggaccttgtcctccccagttggcctactgttacacattaaaacgatttgcccagctaaaaaaaaaaaaaaaaaaaaaaaaaaaaaaaaaaaaaaaaaaaaaaaaaaaaaaaaaaaaaaaaaaaaaa

SEQ ID NO: 1735 - DNA, 2768 bp, Homo sapiens
ccggatcgggaagtgtcaagcgggcgctcccccatctccgccgctattaccactgaacccggaccccctacccaggtccagggccagccgccatgacgaacgtgtactccttggatgggattctggtgtttggtttgctctttgtttgcacctgtgcctacttcaagaaagtacctcgtctcaaaacctggctgctatcagagaagaagggtgtttggggtgtgttttacaaagccgctgtgattggaaccaggctgcatgctgctgtggcaattgcttgtgttgtaatggccttttacgtcctgtttataaaatgaattccaaagcacccaagtcatcaactgccaaccaaggggacggggatgaagaacctgttggagacctgaacccagtgtaggagagttcagctgaaatcatcggtccccaggatgacaccacagcatctgcccctgctatatgtggggaaaactcatggtcacgaacattatttatgcttcaggggactacagaaagccagcttcctttgatctatgtgtaaatcagtccttggcagagtgcatataatgtccggataaattacacccctcggtgataagattacatacctccttcataaaaacctgtcatcctgttttgttcttcagctcctcatcaggatcttttcaaactgaggctcattagggaaggaactaggctgtgttcagacttcttttgaagagagagaattttcaagacttcttttcactctttgatttggatctggcaaattggggaggggatgctgggtgggaaacagttatgaaatgccaagaaattctttggctttagaaatttatctttcatgtacccatccgggaacataaaagagaggcatagtgctcattgcaaaaagagaacagatgaagtagctgtgttatgtgctggtatcttgagagttttgccaagaaaatctgggcctacataaaatttgagaattatctgtgtgatgagaccagaaagcagtggcttagacaagaaaaaatctttctgttcaccagtatcctcaaatggagacttcacttgatcagatggtatatgaaaaatgaatcaactattgctatttcgtaaaacctttttatattttctaaatttacttagtgctaaatactgttactcagttttaaatgccacgactaggggaaaaagaaactattgaagaaataattgtttagtatatttgcagttggggtagaagaaagaaatctagtatattgattcatatactagtaaattcatctagtataagaacttgtgatgttagattgaagttttgtcatcttataaaagacaacaaacttattttctgtttaagtctgagtgttatggcaatttttagttgattacttatttttcttagccaaattttaattttcttcatattgcattgctctttagttgtctctggaaattctatttactttaaggacatgagaaattcaaatgagagaagttgctgatattcatcagtgtgtttggacagttcatagggtccacaaatcaaatgaggttgtttcctgaagtagaagaaaacagaactttgcaattgatactgaagtactttgccatggagttagtaactcctgagcagaccattttagatggctcagcatttggcaggaagacttctccattccctgcttatatctatggaaggatcagctgttggatgtctagaacttctctatttaaaaaaaaagagtaggtctaaaattaaattattataagcaagcatagacatgggtcttccagttgaattgtccattaccgtaaaacttaatggtggacaagttagctgtggttgattcctgtgtggcagtaaattgtcttctgtctgcttactccaaataataaaagctgctaggaagtttagattttgaaataggcagtttaatgctttgagggtttctagaaatacagaaagtcatcaagtaaacactgcatgtctaatcatctcagagttgtggctgttatctcttcaggaattggtccacagggtaaatttcaacaattcatacgttttccattgtcatttctgaggacctttgagatgagagaaaggaaatctagtggaacaggaaagagagttacaccttgtgggtgtgagtttgggacctgttggcagaagggaatgtcactccctggaaacaggttcagcatgtttgcacttgttattttgtagctttaatgatttttgttttctaatagggcaaatgtctctaagcttggtgtttagagctgcttcatattttaaactagttccattccacagttctagttcaaaccagtttttacagcctcctgggtgggtcgtcttgacccaaactcttgtgttgttacattttgagaggttttcataccagaatgtaccaaaaagtgcacaaggtaaaggtaatttacagccagaaacaaatatacatttgtttcatttcttgactttccctaagcagataagcagaaacttgtttaactcattactttgtttgatgtgtcttacatatttttgactaaaagttatagaatgttattcctctgggggaatcttttacaggtggaggaatggggatagcagtattgcctcagattcaaactggcatcaccataaaccctgtaggccagggtggaatgaagtcagctcctttttatagttgaaatacaattttttattcaccattgtctgcacaaatccttgaaaataaacctttttttccctaaaaaaaaaaaaaaaaaaa

SEQ ID NO: 1736 - DNA, 1348 bp, Homo sapiens
gcgagctcggcttcctcaacatggctgcgcccttgtcagtggaggtggagttcggaggtggtgcggagctcctgtttgacggtattaagaaacatcgagtcactttgcctggacaggaggaaccctgggacatccggaacctgctcatctggatcaagaagaatttgctaaaagagcggccagagttgttcatccagggagacagcgtgcggccaggaattctggtgctgattaacgatgccgactgggagctactgggtgagctggactaccagcttcaggaccaggacagcgtcctcttcatctccactctgcacggcggctgagggcccttctctgggcctgggcacccttagaggggagaacgaagcaatcagacatccccttgggccctgcttccaggtctccctgtcccccttgcctgccttcttccctgctctgtcccctaagctccctccaggcagggaaaagaggccaggtgctaaaaatgagcctttctcaagcacgtgagcagcggaaggcagacaggcgccagagcccagcactcccttttccagcagctgtggtgggggagggttcccctccagtttgtcaagagttgaaggaggctctgtggccaggtgacctggctgccttccaccccttgtacctcagtctaaacatggagtggccgctgacaaggcgctccagccccagagccagcgtcttcatggggaagatgaatggacctgagtagctgaaggaaggcccctccctacccaaagactggaggcttctcagcctcaatttccctgtctgtacagctgagggctctgcctgtcccccactgctatcagtatggaaccccagctggggtcccctattgagtgccgactccccccaccgccagcagctgctcctccagccacacccctcctgctccccccacccctagcccttgaccctggctggcctgccccgctccacaggccaccagatgggctcctgagaccctccccaggctgcttacagctcattctgctgggggtagagatgaggggagggagtaagttaaaccttggactagcaagtagaagcctggggggatgcgtgtgcctcagtttcctcctccacaactgaatatttatagtggctgaaaactggggagatacttgatggcgcgaatgtccgttttctctcccttcccacctcctgcaggaagcaggacggggcaggcagcacctggtaggcacagtgctttgcccctcctccccttcccttctggaagtcttggggcctcagtgcttgcaacagccggccttgggcaaataaaagactaggttgtttactaaaaaaaaaaaaaaaaaaa

SEQ ID NO: 1737 - DNA, 4018 bp, Homo sapiens
ttcctccacttcctggactgcgcgaccggaggcctagcgggcgcgcgcccgcaccatcgactcgccaacgagagaaggtcctggggcacggacaccgacgggttgcgactgtgacgtgaggtgttctcgcgcgcgctagcgcgcgtctccgggtgccgctgacgggcgtgcgcgcttgtgcggagccggaggtgggggccgaaccagccaaggttgcgggggccgcagagccggacgaagacggagggcggagccggcttcgggactgcggagactacacaccgagcgagcgcctgggcccgaagggagcgatgctgtggttccagggcgccattccggccgccatcgcgacggccaaaaggagcggcgcggtcttcgtggtgttcgtggcaggtgatgatgaacagtctacacagatggctgcaagttgggaagatgataaagttacagaagcatcttcaaacagttttgttgctattaaaatcgataccaaaagtgaagcctgcctacagttttcacaaatctatcctgtagtgtgtgttccatccagtttctttattggagacagtggaattcccttggaagtaatagcaggaagtgtttctgcagatgaacttgttacaagaattcacaaggtccgacagatgcatttgctaaaaagtgaaacatcagtagcaaatggcagtcagtcagaaagttcagtgtctactccatctgcgtcatttgaacctaacaacacttgtgaaaactctcagtccagaaatgcagagctttgtgagataccacccacttctgatacaaagtcagatactgcaacaggaggagaaagtgcaggccatgccacttcctctcaggagcctagtggatgctcagatcagagacctgcagaggacctcaacatccgagtggaaagactaacaaaaaaacttgaagaaaggagagaagagaaaagaaaagaggaagaacagagagaaattaagaaggaaattgagaggagaaaaactggaaaagaaatgttggattataaaagaaaacaagaagaagaattaacaaaaagaatgctggaggaaagaaacagagagaaagcagaagatagggcagctcgagaacgtataaaacagcagattgcattggaccgtgcagagagagctgctcgttttgcaaagacaaaggaagaagtagaggctgccaaagctgctgccttgctagcaaaacaggcagaaatggaagtcaagagggaatcttatgcaagagaaagaagcactgttgcaagaattcaattccgtcttcctgatggttcttcctttacaaatcagttcccttctgatgctcctctagaagaggcaaggcagtttgctgcacagactgttggcaacacttacggtaatttttcgttagcaaccatgtttcccaggagggaatttaccaaagaagattataaaaagaagttactggatttggaacttgccccaagcgcttcggtggtactgttgccagcaggaagaccaactgcatccattgtacactcttccagcggagacatttggaccttgttgggaacagtgctttatccattccttgccatctggagattaattagcaatttcttgtttagtaatccgcctcccacacagacttcagtgagagtaacatcgtcagaacccccaaaccctgcatcatctagcaaatcagaaaaaagggaaccagtgagaaaaagagtgctggaaaaacgtggagacgactttaaaaaggaggggaaaatttatagattaaggactcaagatgatggtgaagatgaaaacaacacttggaatggaaattccactcaacagatgtagtgtgacaagtataatatgtgcaataatcattgtttctcttatgatttaattcaactaaaattctactggagaagtgggactgctttatattttccaactggtctataaaatgtctctttattcctgcttagtgggtgtgggttgaaggtgtttaactcagaaaagtaaagacaggaaataactctctgctaggtccttgcttatatggcaaccactgctagaaccctaaaagaaccaaaaatctgccacagcctgcctccatcagcttcttatttagtatttcatatgcccattagccctatgcttcagatgacacgttttgtttagagctactttgctccaagactcttaagcccaaagtaactggtatgtcactgagtaacttgactcggtgtcagagcattttaactagccactcagatgagaatttatgtttaacttctctttttactcatcagctgcaagcaaaatcttgtagtttttaatcttaaacactgaataaaaaaactttcccctaaattggaatgatcttagttttgctttgagttttgttatctagcatctttttgttgcacagggctctattgaggtcctatgtctctgatttttttttttccccagtattgccctggagctgtctctggaaagtagctggcgaggttaccttaactatcactgaagaaagaaattttctgacacactgatggcatgtgacttgtctcctaagtcagtgaggcatcactttgtttgcataaagtatacggtttgttaaggcctttgttcttgtgagatgcaaaacagctgctagtctgcaacctagttttccctctcacctttaactgacgttttgtcctcaataattacacaaggacctagagtacctataggacaaaaagtatagaataaaaatatgcctttagtcatttggtttttcttaaaaagttgagattcttaatctgacttacatgttactttatccgtatgtctttgttagtggagaccgctaaactaatgatgtttgaaaacagttcctctgttttagattggaagatagcactctagagtggacatacggaaagactgtgactttattttgtaatgggaggaagaaattttctcagagcaaactttctattttttacctgtgaaataacagtgactttttaaaatggtgacagtgttggcaaggaaacagcaacacaggctgcgctgttggtaggagtgaaaaccagtataattcttctgaaaaacatttatcagaaacttaaaatatttcataccgtttgatccagtagcttcttctaaatcataaatgcagacaatgtttaggtaaagacatactcattaagtgttatttattttactcaagaactggaaaccaactaaatgccttctatagaagtaatttttgatgaggagaaatggtacaatactaattaacaacttggtttaacatgtttactgagcatctgttaagtgttgggggaaaaagcagcaggatccagagctataggtacagtgtgatctcagctttgcaaacacattttctacatagatagtactaggtattaatagatatgtaaagaaagaaatcacaccattaataatggtaagattggtttatgtgattttagtggtatttttggcacccttatatatgttttccaaactttcagcagtgatattatttccataacttaaaaagtgagtttgaaaaagaaaatctccagcaagcatctcatttaaataaaggtttgtcatctttaaaaatacagcaatatgtgactttttaaaaaagctgtcaaataggtgtgaccctactaataattattagaaatacatttaaaaacatcgagtacctcaagtcagtttgccttgaaaaatatcaaatataactcttagagaaatgtacataaaagaatgcttcgtaattttggagtaggaggttccctcctcaattttgtatttttaaaaagtacatggtaaaaaaaaaaattcacaacagtatataaggctgtaaaatgagaattctgccccctcacctcttaccccagtactattctccagaggtaatctattaacaatttcttatgtaattttcagaaaatttgtatgcgtatataagcaaatatgtaatctttattttttaaataaatgggatcatattatatattctaaaa

SEQ ID NO: 1738 - DNA, 2946 bp, Homo sapiens
cgggtgagtcccacttcccgacagcctggctcggccagcgactgggcggggagaccaaggatggaagtgggcttaccggccattaccctctttctcaccagcgccagcagccctgtggtggcgacgacgatggaccaggagccagtgggcggtgtggaacgaggagaagccgtcgcagcctcgggagctgcggccgccgcggcattcggggaatctgcagggcagatgagtaacgaaagaggctttgaaaatgtagaactgggagtcataggaaaaaagaagaaagtcccaaggagagtcatccactttgttagtggtgaaacaatggaagaatatagcacagatgaagacgaagttgatggcctggagaagaaagatgttttgcctactgttgatccgacaaaacttacctggggtccctacttatggttttacatgcttcgggctgctacatcaactctctcagtgtgtgacttccttggagagaagattgcatctgttttgggtatcagcaccccaaagtaccaatatgccattgatgaatattatcggatgaagaaggaggaagaagaagaagaagaagaaaacaggatgtctgaagaagcagaaaaacaatatcaacagaataaattgcagactgattccattgttcagacagatcaaccagagacagtgatatccagctcatttgtgaatgtcaattttgaaatggagggagacagtgaagtaattatggaaagcaagcaaaatccagtctctgtcccaccataaaatgaaatgactatcaagcttcaaactcttaagttttttttttttaatacaaaaactttcacattctttattcagtgggacttaatacaattatttatattttaaattattaaagtatctggaaagggaaaatgttttcttcatttttaggatctatctagcaaaagccagatctgaaattcagatatttgtactgtttttactgtgtatagaaattagtgctttggttttaaaatgatcttttaaaaaagttaaggacatcctagagccttaatagttaagaagagttaaattatcaagcctatttgtgcatttgctttttttgaaaaaggtaagttgctgattaagtctaattggaattgataattccatagtcttagattaaaatgaggatattttctcctagattttctcatgttatgccatgcatttatatatctaaccattaatttcacactaaggatgcttcaccatataataaaaggagcaagatggaagcactttgaattttctttcattgagaataactgttttatgtaagaatctgtatttataacaccagatattaagataggcttccattttttaatgcaagccacttacttaatcttgtattctttttcaggactcaaataactagctttgaacataatattaaaacactacttatagaatagatttattaatgttaatacctagtgaatatccatgtggcatcctggttatgttatcggttcagcgttaatcctatagaaaagtggtttggaggggattgggggatagtgggacaggtatagatttaatccatcaggagcaattagatattgtataaggtgcaatgatagcctaatgaaattacccgtcattcatcatttagaagtagcaacagtgaagactggacagtttacttgaatctggttggccactcctctacctacttggttatttgtaaaccttacaaatgtatatattgtgaagctaattttgaaaatattcctaaatatggccaggtacggtgctcacacctgtaatcccagcactttgggaggctgaagtgggcagattacttgaggtcaggagtttgagaccagcctggccaacgtagtgaaaccccgtctctacaaaaatacaaaaattagccaggcgtggtggtgcacgtctgtaatcccagctgctcgggaggctgaggcaggagaatcacttgaaccagggaggtggaggttgcagtgagccaagattgcaccactgcactccagcctgggcgacagagtgagactccatcttggggggaaaaaagtatatatatatacacacacacagacacacacacacacacatatatctctaaatgtgtgtatagaaccttttatcagtataacattgatttataattaaatgtgggtgaggaagaatgtgtggagtgtttcagaaattttgatcttaaaagccttttcagaaactcaaagctttcagaaattaatagttatattaatagccttctaaacagcattaagttttcaattttaatatatctatataaaatatagtgtcaaagaaagtaacatcaatatagtgggtctgtaatggaaatctgtcaatgaacatgaactgagttcttcaactacaggttgaaggataattaaacttttcattaggagtgttcagctacatggattcatggaatggtggttcatagtaagtgatggtaatctttttattcatgggtgtaaaccctttataacttagtgcttaaaatattaatcttttgattatataatgtcccatgaattatagtttaccaatagttctaaaacatgctaacctgaccttttccttctaatttgtttttaacttcattcgagatagtacctctcactcacagatatttatttggttatcaagtgaagataggtgtgtctaaaagtgatcttctgaatcctgtctccctagaggtactagtatctagagtttacccagaaaattttatgattgtaacaaaaggaagtagtgacttatgaaggttttgtttcttgaattttacttttgctacttgtccaatagtggctagtttatgtttatcaatatagttattcactgtgccttaagtttatactttgtttatgcaaactataaaatttcccataaatgtattcaaaaaaaaaaaaaaaaaaaaaa
